United States Patent Application Publication US 2025/0101403 A1 - sequence listing, part 4

SEQ ID NO: 12711 - protein, 500 aa, synthetic construct
MRALVVIRLSRVTDATTSPERQLESCQQLCAQRGWDVVGVAEDLDVSGAVDPFDRKRRPNLARWLAFEEQPFDVIVAYRVDRLTRSTRHLQQLVHWAEDHKKLVVSATEAHFDTTTPFAAVVIALMGTVAQMELEAIRERNRSAAHFNIRAGKYRGSLPPWGYLPTRVDGEWRLMPDPVQRERILEVYHRVVDNHEPLHLVAHDLNRRGVLSPKDYFAQLRGREPRGRKWSATALKRSMISEAMLGYATLNGKTVRDDDGAPLVRAEPILTREQLEALRAELVKTSRAKPAVSTPSLLLRVLFCAVCGEPAYKFAGGGRKHPRYRCRSMGFPKHCGNGTVAMAEWDAFCEEQVLDLLGDAERLEKVWVAGSDSAVELAEVNAELVDLTSLVGSPAYRAGSPQREALDARIVALTARQEELEGLEARPSGWEWRETGQRFRDWWREQDTAAKNTWLRSMNVRLTFDVRGGLTRTIDFGDLQEYEQHIRLGSVVERLHTGMS

SEQ ID NO: 12712 - protein, 500 aa, synthetic construct
MRALVVIRLSRVTDATTSPERQLESCQQLCAQRDWDVVGVAEDLDVSGAVDPFDRKRRPNLARWLAFEEQPFDVVVAYRVDRLTRSIRHLQQLVHWAEDHKKLVVSATEAHFDTTTPFAAVVIALMGTVAQMELEAIKERSRSAAHFNIRAGKYRGSLPPWGYLPARVDGEWRLAPDPVQRERILEVYHRVVDNHEPLHLVAHDLNRRGVLSPKDYFAQLRGREPQGRKWSATALKRSMISGAMLGYATLNGKTVRDDDGAPLVRAEPILTREQLEALRAELAKTSRAKPAVSTPSLLLRVLFCAVCGEPAYKFSGGGRKHPRYRCRSMGFPKHCGNGTVAMAEWDAFCEEQVLDLLGDAERLEKVWVAGSDSAVELAEVNAELVDLTSLIGSPAYRAGSPQREALDARIAALAARQEELEGLEARPSGWEWRETGQRFGDWWREQDTAAKNTWLRSMNVRLTFDVRGGLTRTIDFGDLREYGQHLRLGSVVERLHTGMS

SEQ ID NO: 12713 - protein, 500 aa, synthetic construct
MRALVVIRLSRVTDATTSPERQLESCQQLCAQRGWDVVGVAEDLDVSGAVDPFDRKRRPNLARWLAFEEQPFDAVVAYRVDRLTRSIRHLQQLVHWAEDHKKLVVSATEAHFDTTTPFAAVVIALMGTVAQMELEAIKERNRSAAHFNIRAGKYRGSLPPWGYLPTRVDGEWRLAPDPVQRERILEVYHRVVDNHEPLHLVAHDLNRRGVLSPKDYFAQLQGREPQGRKWSATALKRSMISVAMLGYATLNGKTVRDDDGAPLVRAEPILTREQLEALRAELAKTSRAKPAVSTPSLLLRVLFCAVCGEPAYKFAGGGRKHPRYRCRSMGFPKHCGNGTVAMAEWDAFCEEQVLNLLGDAERLERVWVAGSDSAVELAKVNAELVDLTSLIGSPAYRAGSPQREALDARIAALAARQEELEGLEARPSGWEWRETGQRFGDWWREQDTAAKNTWLRSMNVRLTFDVRGGLTRTIDFGDLQEYEQHLRLGSVAERLHTGMS

SEQ ID NO: 12714 - protein, 500 aa, synthetic construct
MHALVVIRLSRVTDASTSPERQLESCQQLCAQRGWDVVGVAEDLDVSGAVDPFDRKRRPNLARWLAFEEQPFDVIVAYRVDRLTRSIRHLQQLVHWAEDHKKLVVSATEAHFDTTTPFAAVTIALMGTVAQMELEAIKERSRSAAHFNIRAGKYRGSLPPWGYLPTRVDGEWRLAPDPVQRERILEVYHRVVDDHEPLHSVAHDLNRRGVLSPRDYFAQLQGREPRGRKWSATALKRSMISEAMLGYVTLNGKTVRDDDGAPLVRAEPILTREQLEALRAELVKTSRAKPAVSTPSLLLRVLFCAVCGEPAYKFAGGGRKHPRYRCRSMGFPKHCGNGTVAMAEWDAFCEEQVLDLLGDAERLEKVWVAGSDSAVELAEVNAELVDLTSLIGSPAYRAGSPQREALDARIAALAARQGELEGLEARPSGWEWRETGQRFGDWWREQDTAAKNTWLRSMNVRLTFDVRGGLTRTIDFGDLQEYEQHLRLGSVVERLHTGMS

SEQ ID NO: 12715 - protein, 500 aa, synthetic construct
MRALVVIRLSRVTDATTSPERQLESCQQLCAQRGWDVVGVAEDLDVSGAVDPFDRKRRPNLARWLAFEEQPFDVIVTYRVDRLTRSTRHLQQLVHWAEDYKKLVVSATEAHFDTTTPFAAVVIALMGTVAQMELEAIKERSRSAAHFNIRAGKYRGSLPPWGYLPTRVDGEWRLVPDPVQRERILEVYYRVVDNHEPLHLVAHDLNRRGVLSPRDYFAQLQGREPQGRKWSATALKRSMISGAMLGYATLNGKTVRDDDGAPLVRAEPILTREQQEALRAELVKTSRAKPAVSTPSLLLRVLFCAVCGEPAYKFAGGGRKHPRYRCRSMGFPKHCGNGTVAMAEWDAFCEEQVLDLLGDAERLEKVWVAGSDPAVELAEVNAELVGLTSLIGSPAYRAGSPQREALDARIAALAARQEELEGLEARPSGWEWRGTGQRFGDWWREQDTAAKNTWLRSMNVRLTFDVRGGLTRTIDFGDLQEYELHLRSGGVVERLHTGMS

SEQ ID NO: 12716 - protein, 500 aa, synthetic construct
MRALVVIRLSRVTDATTSPERQLESCQQLCAQRGWDVVGVAEDLDVSGAVDPFDRKRRPNLARWLAFEEQPFDVIVAYRVDRLTRSIRHLQQLVHWAEDHKKLVVSATEAHFDTTTPFAAVVIALMGTVAQMELEAIKERSRSAAHFNIRAGKYRGSLPPWGYLPTRVDGEWRLVPDPVQRERILEVYHRVVDNHEPLHLVAHDLNRRGVLSPKDYFAQLQGREPQGRKWSATALKRSMISEAMLGYATLNGKTVRDDDGAPLVRAEPILTREQQEALRAELVKTSRAKPAVSTPSLLLRVLFCAVCGEPAYKFAGGGRKHPRYRCRSMGFLKHCGNGTVAMAEWDAFCEEQVLDLLGDAERLEKVWVAGSDSAVELAEVNAELVDLTSLIGSPAYRAGSPQREALDARIAALAARQEELEGLEARPSGWEWRETGQRFGDWWREQDTAAKNTWLRSMNVRLTFDVRGGLTRTIDFGDLQEYEQHLRSGSVVGRLHTGMS

SEQ ID NO: 12717 - protein, 500 aa, synthetic construct
MRALVVIRLSRVTDATTSPERQLESCQQLCAQRGWDVVGVAEDLDVSGAVDPFDRKRRPNLARWLAFEEHPFDVIVAYRVDRLTRSVRHLQQLVHWAEDHKKLVVSATEAHFDTTTPFAAVVIALMGTVAQMELEAIKERNRSAAHFNTRAGKYRGSLPPWGYLPTRVDGEWRLVPDPVQRERILEVYHRVVVNHEPLHLVAHDLNRRGVLSPRDYFAQLRGREPQGRKWSATALKRSMISEAMLGYATLNGKTVRDDDGAPLVRAEPILTREQQEALRAELVKTSRAKPAVSTPSLLLRVLFCAVCGEPAYKFAGGGRKHPRYRCRSMGFPKHCGNGTVAMAEWDAFCEEQVLNLLGDAERLEKVWVAGSDSAVELAEVNAELVDLTSLIGSPAYRAGSPQREALDARIAALAARQEELAGLEARPSGWEWRKTGRRFGDWWREQDTAAKNTWLRSMNVRLTFDVRGGLTRTIDFGDLQEYEQHLRLGSVVERLHTGMS

SEQ ID NO: 12718 - protein, 500 aa, synthetic construct
MRALVVIRLSRVTDATTSPERQLESCQQLCDQRGWDVVGVAEDLDVSGAVDPFDRKRRPNLARWLAFEEQPFDVIVAYRVDRLARSIRHLQQLVHWAEDHKKLVVSATEAHFDTTTPLAAVVIALMGTVAQMELEAIKERNRSAAHFNIRAGKYRGSLPPWGYLPTRVDGEWRLAPDPVQRERILEVYHRVVDNHEPLHLVAHDLNRRGVLSPKDYFAQLRGREPQGRKWSATALKRSMISVAMLGYATLNGKTVRDDDGAPLVRAEPILTREQLEALRAELVKTSRAKPAVSTPSLLLRVLFCAVCGEPAYKFSGGGRKHPRYRCRSMGFPKHCGNGTVAMAEWDAFCEEQVLDRLGDAERLEKVWVAGSDSAVELAEVNAELVDLASLTGSPAYRAGSPQREALDARIAALAARQGELEGLEAHPSGWEWRETGQRFGDWWREQDTAAKNTWLRSMNVRLTFDVRGGLTRTIDFGDLQEYEQHLRLGGVVERLHTGMP

SEQ ID NO: 12719 - protein, 500 aa, synthetic construct
MRALVVIRLSRVTDATTSPERQLESCQQLCAQRGWDVVGVAEDLDVSGAVDPFDRKHRPNLARWLAFEEQPFDVIVAYRVDRLTRSTRHLQQLVHWAEDHEKLVVSATEAHFDTTTPFAAVVIALMGTVAQMELEAIKERNRSAAHFNIRAGKYRGSLPPWGYLPARVDGEWRLVPDPVQRERILEVYHRVVDNHEPLHLVAHDLNRRGVLSPKDYFAQLRGREPQGRKWSATALKRSMISEAMLGYATLNGKTVRDDDGAPLVRAEPILTRGQLEALRAELVKTSRAKPAVSTPSLLLRVLFCAVCGEPAYKFAGGGRKHSRYRCRSMGFSKHCGNGTVAMAEWDAFCEEQVLDLLEDAERLEKVWVAGSDSAVELAEVNAELVDLTSLIGSPAYRAGSPQREALDARIAALAARQEELEGLEARPSGWEWRETGQRFGDWWREQDTAAKNTWLRSMNVRLTFDVRGGLTRTIDFGDLQEYEQHLRLGSVVERLHTGMS

SEQ ID NO: 12720 - protein, 500 aa, synthetic construct
MRALVVIRLSRVTDATTSPERQLESCQQLCAQRGWDVVGVAEDLDVSGAVDPFDRKRRPNLARWLAFEEQPFDVIVAYRVDRLTRSIRHLQQLVHWAEDHKKLVVSATEAHFDTTTPFAAVVIALMGTVAQMELEAIKERSRSAAHFNIRAGKYRGSLPPWGYLPARVDGEWRLVPDPVQRERILEVYHRVVDDHEPLHLVAHDLNRRGVLSPKDYFAQLQGREPQGRKWSATALKRSMISKAMLGYATLNGKTVRDGDGAPLVRAEPILTREQLEALRAELVKTSRAKPAVSAPSLLLRVLFCAVCGEPAYKFAGGGRKHPRYRCRSMGFPKHCGNGTVAMAEWDAFCGEQVLNLLGDAERLEKVWVAGSDSAVEHAEVNAELVDLTSLIGSPAYRAGSPQREALDARIAALAARQEELEGLEARPSGWEWRETGQRFGDWWREQDTAAKNTWLRSMNVRLTFDVRGGLTRTIDFGDLQEYEQHLRSGSVVERLHTGMS

SEQ ID NO: 12721 - protein, 500 aa, synthetic construct
MRALVVIRLSRVTDATTSPERQLESCQQLCAQRGWDVVGVAEDLDVSGAVDPFDRKRRPNLARWLAFEEHPFDVIVAYRVDRLTRSTRHLQQLVHWAEDHKKLVVSATEAHFDTTTPFAAVVIALMGTVAQMELEAIKERSRSAAHFNIRAGKYRGSLPPWGYLPARVDGEWRLVPDPVQRERILEVYHRVVDNHEPLHLVAHDLNRRGVLSPKDYFAQLRGREPQGRKWSATALKRSMISEAMLGYATLNGKTVRDDGGAPLVRAEPILTREQLEALRTELVKTSRAKPAVSTPSLLLRVLFCAVCGEPTYKFSGGGRKHPRYRCRSMGFPKHCGNGTVAMAEWDAFCEEQVLDLLGDAERLEKVWVAGSDSAVELAEVNAELVDLTSLIGSPAYRAGSPQREALDARIAALAARQGELEGLEARPSGWEWRETGQRFGDWWREQDTAAKNTWLRSMNVRLTFDVRGGLTRTIDFGDLQEYEQHLRLGSVVERLHTGMS

SEQ ID NO: 12722 - protein, 500 aa, synthetic construct
MRALVVIRLSRVTDATTSPERQLESCQQLCAQRGWDVVGVAEDLDVSGAVDPFDRKRRPNLARWLAFEEQPFDVIVAYRVDRLARSIRHLQQLVHWAEDHRKLVVSATEAHFDTTTPFAAVVIALMGTVAQMELEAIKERSRSAAHFNIRAGKYRGSLPPWGYLPTRVDGEWRLVPDPVQRERILEVYHRVVDNHEPLHLVAHDLNRRGVLSPRDYFAQLRGREPQGRKWSATALKRSMISEAMLGYATLNGRTVRDDDGAPLVRAEPILTREQLEALRAELVKTSRAKPAVSTPSLLLRVLFCAVCGEPAYKFAGGGRKHPRYRCRSMGFPKHCGNGTVAMAEWDSFCEEQVLGLLGDAERLEKVWVAGSDSAVELAEVNAELVDLTSLIGSPAYRAGSPQREALDARIAALAARQEELEGLEARPSDWEWRETGQRFGDWWREQDTAAKNTWLRSMNVRLTFDVRGGLTRTIDFGDLQEHEQHLRLGSVVVRLHTGMS

SEQ ID NO: 12723 - protein, 500 aa, synthetic construct
MRALVVIRLSRVTDATTSPERQLESCQQLCVQRGWDVVGVAEDLDVSGAVDPFDRKRRPNLARWLAFEEQPFDVIVAYRVDRLARSIRHLQQLVHWAEDHKKLVVSATEAHFDTTTPFAAVVIALMGTVAQMELEAIKERSRSAAHFNIRAGKYRGSLPPWGYLPTRVDGEWRLAPDPVQRERILEVYHRVVDNHEPLHLVAHDLNRRGVSSPKDYFAQLRGREPQGRKWSATALKRSMTSEAMLGYATLNGKTVRDDDGAPLVRAEPILTRGQLEALRAELVKTSRAKPAVSTPSLLLRVLFCAVCGEPAYRFAGGGRKHPRYRCRSMGFPKHCGNGTVAMTEWDAFCEEQVLDLLGDAERLEKVWVAGSDSAVELAEVNAELVDLTSLISSPAYRAGSPQREALDARIAALAARQEELEGLEARPSGWEWRGTGQRFGDWWREQDTAAKNTWLRSMNVRLTFDVRGGLTRTIDFGDLQEYEQHLRLGSVVERLHTGLS

SEQ ID NO: 12724 - protein, 500 aa, synthetic construct
MRALVVIRLSRVTDATTSPERQLESCQQLCAQRGWDVVGVAEDLDVSGAVDPFDRKRRPNLARWLAFEEQPFDVIVAYRVDRLTRSVRHLQQLVHWAKDHKKLVVSATEAHFDTTTPFAAVVIALMGTVAQMELEAIKERNRSAAHFNIRAGKYRGSLPPWGYLPTRVDGEWRLAPDPVQRERILEVYHRVVDNHEPLYLVAHDLNRRGVLSPKDYFAQLQGREPQGRRWSATALKRSMTSEAMLGYATLNGKTVRDNDGAPLVRAEPILTREQLEALRAELVKTSRAKPAVSTPSLLLRVLFCAVCGEPAYKFAGGGRKHPRYRCRSMGFPKHCGNGTVAMAEWDAFCEEQVLDLLGDAKRLEKVWVAGSDSAVELAEVNAELVDLTSLIGSPAYRVGSPQREALDARIAALAARQEELEGLEARPSGWEWRETGQRFGDWWREQDTAAKNTWLRSMNVRLTFDVRGGLTRTIDLGDLQEYEQHLRLGSVVERLHTGMS

SEQ ID NO: 12725 - protein, 500 aa, synthetic construct
MRALVVIRLSRVTDATTSPERQLESCQQLCAQRGWDVVGAAEDLDVSGAVDPFDRKRRPNLARWLAFEEQPFDVIVAYRVDRLTRSIRHLQQLVHWAEDHKKLVVSATEAHFDMTTPFAAVVIALMGTVAQMELEAIKERSRSAAHFNIRAGKYRGSLPPWGYLPTRVDGEWRLAPDPVQRERILEVYHRVVDNHEPLHLVAHDLNRRGVLSPKDYFAQLQGREPQGRKWSATALKRSMISEAMLGYATLNGKTVRDDDGAPLVRAEPILTCEQLEALRAELVKTSRAKPAVSTPSLLLRVLFCAVCGEPAYKFSGGGRKHPRYRCRSMGFPKHCGNGTVAMAEWDAFCEEQVLDLLGDAERLEKVWVAGSDSAVELAEVNAELVDLTSLIGSPAYRAGSPQREALDARIAALAARQGELEGLGACPSGWEWRETGQRFGDWWREQDTAAKNTWLRSMNVRLTFDVRGGPTRTIDFGDLQEYEQHLRLGGVVERLHTGMS

SEQ ID NO: 12726 - protein, 500 aa, synthetic construct
MRALVVIRLSRVTDATTSPERQLESCQQLCAQRGWDVVGVAEDLDVSGAVDPFDRKRRPNLARWLAFEEQPFDVIVAYRVDRLTRSIRHLQQLVHWAEDHKKLVVSATEAHFDTTTPFAAVTIALMGTVAQMELEAIKERSRSAAHFNIRAGKYRGSLPPWGYLPTRVDGEWRLAPDPVQRERILEVYHRVVDDHEPLHSVAHDLNRRGVLSPRDYFAQLQGREPRGRKWSATALKRSMISEAMLGYVTLNGKTVRDDDGAPLVRAEPILTREQLEALRAELVKTSRAKPAVSTPSLLLRVLFCAVCGEPAYKFAGGGRKHPRYRCRSMGFPKHCGNGTVAMAEWDAFCEKQVLDLLGDAERLEKVWVAGSDSAVELAEVNAELMDLTSLIGSPAYRVGSPQREALDARIAALAARQEELEGLEARPSGWEWRETGQRFGDWWREQDTAAKNTWLRSMNVRLTFDVRDGLTRTIDFGDLQEYEQHLRLGSVVERLHTGMS

SEQ ID NO: 12727 - protein, 500 aa, synthetic construct
MRALVVVRLSRVTDATTSPERQLESCQQLCAQRGWDVVGVAEDLDVSGAVDPFDRKRRPNLARWLAFEEQPFDVIVAYRVDRLARSIRHLQQLVHWAEDHKKLVVSATEAHFDTTTPFAAVVIALMGTVAQMELEAIKERSRSAAHFNIRAGKYRGSLPPWGYLPARVDGEWRLVPDPVQRERILEVYHRVVDNHEPLHLVAHDLNRRGVLSPKDYFAQLQGREPQGRKWSATALKRSMISEAMLGYATLNGKIVRDDGGAPLVRAEPILTREQLEALRAEFVKTSRAKPAVSTPSLLLRVLFCAVCGEPAYKFAGGGRKHPRYRCRSMGFPKHCGNGTVAMAEWDAFCEEQVLNLLGDAERLEKVWVAGSDSAVELAEVNAELVDLTSLIGSPAYRAGSPQREALDARTAALAARQEELEGLEARPSGWEWRETGQRFGDWWREQDTAAKNTWLRSMNVRLTFDVRGGLTRTIDFGDLHEYEQHLRLGSVVERLHTGMS

SEQ ID NO: 12728 - protein, 500 aa, synthetic construct
MRALVVIRLSRVTDATTSPERQLESCQQLCAQRGWDVVGVAEDLDVSGAVDPFDRKRRPNLARWLAFEERPFDVIVAYRVDRLTRSTRHLQQLVHWAEDHKKLVVSATEAHFDTTTPFAAVVIALMGTVAQMELEAIKERSRSAAHFNIRAGKYRGSLPPWGYLPTRVDGEWRLVPDPVQRERILEVYHRVVDNHEPLHLVAHDLNRRGVLSPKDYFAQLQGREPQGREWSATALKRSMISGAMLGYATLNGKTVRDDDGAPLVRAEPILTREQQEALRAELVKTSRAKPAVSTPSLLLRVLFCAVCGEPAYKFAGGGRKHPRYRCRSMGFPKHCGNGTVAMAEWDAFCEEQVLGLLGDAEHLEKVWVAGSDSAVELAEVNAELVDLTSLIGSPAYRAGSPQREALDARIAALAARQGELEGLEARPSGWEWRGTGQRFGDWWREQDTAAKNAWLRSMNVRLTFDVRGGLTRTIDFGDLQEYEQHLRFGSVVERLHTGMS

SEQ ID NO: 12729 - protein, 500 aa, synthetic construct
MRALVVIRLSRVTDATTSPERQLESCQQLCAQRGWDVVGVAEDLDVSGAVDPFDRKRRPNLARWLAFEEQPFDVIVAYRVDRLTRSVRHLQQLVHWAEDHKKLVVSATEAHFDTTTPFAAVVIALMGTVAQMELEAIKERNRSAAHFNIRAGKYRGSLPPWGYLPTRVDGEWRLVPDPVQRERILEVYRRVVDNHEPLHLVAHDLNRRGVLSPKDYFAQLRGREPQGRRWSATALKRSMTSEAMLGYATLNGKTVRDDDGAPLVRAEPILTREQLEALRAELVKTSRAKPAVSTPSLLLRVLFCAVCGEPAYKFAGGGRKHPRYRCRSMGFPKHCGNGTVAMAEWDAFCEEQILDLLGDAERLEKVWVAGSDSAIELAEVNAELVDLTSLIGSPAYRAGSPQREALDARIAALAARQEELEGLEARPSGWKWRETGQRFGDWWREQDTAAKNTWLRSMNVRLTFDVRGGLTRTIDFGDLQEYERHLRLGSVVERLHTGMS

SEQ ID NO: 12730 - protein, 500 aa, synthetic construct
MRALVVVRLSRVTDATTSPERQLESCHQLCAQRGWDVVGVAEDLDVSGAVDPFDRKRRPNLARWLAFEEQPFDVIVAYRVDRLTRSVRHLQQLVHWAEDHKKLVVSATEAHFDTTTPFAAVVIALMGTVAQMELEAIKERNRSAAHFNIRAGKYRGSLPPWGYLPTRVNGEWRLVPDPVQRERILEVYHRVVDNHEPLHLVAHDLNRRGVLSPRDYFAQLQGRKPQGRKWSATALKRSMISEAMLGYATLNGKIVRDDDGAPLVRAEPILTREQLEAIRAELVKTSRAKPAVSTPSLLLRVLFCAVCGEPAYKFAGGGRKHPRYRCRSMGFPKHCGNGTVAMAEWDAFCEEQVLDLLGDAERLEKVWVAGSDSAVELAEVNAELVDLTSLIGSPAYRAGSPQREALYARIAALAARQEELEGLEARPSGWEWRETGQRFGDWWREQDTAAKNTWLRSMNVRLTFDVRGGLTRTIDFGDLQEYEQHLRLGSVVERLHTGMS

SEQ ID NO: 12731 - protein, 500 aa, synthetic construct
MRALVVIRLSRVTDATTSPERQLESCQQLCAQRGWDVVGVAEDLDVSGAVDPFDHKRRPNLARWLAFEEQPFDAIVAYRVDRLTRSIRHLQQLVHWAEDHKKLVVSATEAHFDTTTPFAAVVIALMGTVAQMELEAIKERSRSAAHFNIRAGKYRGSLPPWGYLPTRVDGEWRLVPDPVQRERILEVYHRVVDNHEPLHLVAHDLNRRGVLSPRDYFAQLRGREPQGRKWSATALKRSMISEAMLGYVTLNGKIVRDDDGAPLVRAEPILTREQLEALRAELVKTSRAKPAVSTPSLLLRVLFCAVCGEPAYKFAGGGRKHPRYRCRSMGSPKHCGNGTVAMAEWDAFCEEQVLNLLGDAERLEKVWVAGSDSAVELAEVNAELVDLTSLIGSPAYPAGSPQREALDARIAALAARQEELEGLEARPSGWGWRETGQRFGDWWREQDTAAKNTWLRSMNVRLTFDVRGGLTRTIDFGDLQEYKQHSRLGSVVERLHTGMS

SEQ ID NO: 12732 - protein, 500 aa, synthetic construct
MRALVVIRLSRVTDATTSPERQLESCQQLCAQRGWDVVGVAEDLDVSGAVDPFDRKRRPNLARWLAFEEQPFDAIVAYRVDRLARSIRHLQQLVHWAEDHKKLVVSATEAHFDTTTPFAAVVIALMGTVAQMELEAIKERSRSAAHFNIRAGKYRGSLPPWGYLPARVDGEWRLVPDPVQRERILEVYHRVVNNHEPLHLVAHDLNRRGVLSPKDYFAQLQGREPQGRKWSATALKRSMTSEAMLGYATLNGKTVRDDDGAPLVRAEPILTREQLEALRAELVKTSRAKPAVSTPSLLLHVLFCAVCGEPAYKFSGGGRKHPRYRCRSMGFPKHCGNGTVAMAEWDAFCEEQVLDLLGDAERLEKVWVAGSDSAVELAEVNAELVDLTSLIGSPAYRAGSPQREALDARIAALAARQAELEGLEARPSGWEWRETGQGFGDWWREQDTAAKNTWLRSMNVRLTFDVRGGLTSTIDFGDLQEYEQRLRLGSLVERLHTGMS

SEQ ID NO: 12733 - protein, 500 aa, synthetic construct
MRALVVIRLSRVTDATTSPERQLESCQQLCAQRGWDVVGVAEDLDVSGAVDPFDRKRRPNLARWLAFEEQPFDVIVAYRVDRLARSIRHLQQLVHWAEDHKKLVVSATEAHFDTTTPFAAVVIALMGTVAQMELEAIKERTRSAAHFNIRAGKYRGSLPPWGYLPARVDGEWRLAPDPVQRERILEVYHRVVDNHEPLHLVAHDLNRRGVLSPKDYFAQLQGREPQGRKWSATALKRSMTSEAMLGYATLNGKTVRDDDGAPLVRAEPILTREQLEALRAELVKTSRAKPAVSTPSLLLRVLFCAVCGEPAYKFSGGGRKHPRYRCRSMGFPKHCGNGTVAMAEWDAFCEEQVLDLLGDAERLEKVWAAGSDSAVELAEVNAELVDLTSLIGSPAYRAGSPQREALDARIAALAARQAELEGLEARPSGWEWRETGQGFGDWWREQDAAAKNTWLRSMSVRLTFDVRGGLTRTIDFGDLQEYKQHLRLGSVVERLHTGMS

SEQ ID NO: 12734 - protein, 500 aa, synthetic construct
MRALVVIRLSRVTDATTSPERQLESCQQLCVQRGWDVVGVAEDLDVSGAVDPFDRKRRPNLARWLAFEEQPFDVIVAYRVDRLTRSTRHLQQLVHWAEDHKKLVASATEAHFDTTTPFAAVVIALMGTVAQMELEAIKERNRSAAHFNIRAGKYRGSLPPWGYLPTRVDGEWRLVPDPVQRERILEVYHRVVDNHEPLHLVAHDLNRRGVLSPKDYFARLQGREPQGRKWSATALKRSMISGAMLGYATLNGKIVRDDDGAPLVRAEPILTREQLEALRAEFVKTSRAKPAVSTPSLLLRVLFCAVCGEPAYKFAGGGRKHPRYRCRSMGFPKHCGNGTVAMAEWDAFCEEQVLNLLGDAERLEKVWVAGSDSAVELAEVNAELVDLTSLIGSPAYRAGSPQREALDARIAALAARQEELGGLEARPSGWEWRETGQRFGDWWREQDTAAKNTWLRSMNVRLTFDVRGGLTRTIDLGDLQEYEQHLRLGGVVERLHTGAS

SEQ ID NO: 12735 - protein, 500 aa, synthetic construct
MRALVVIRLSRVTDATTSPERQLESCQQLCAQRGWDVVGVAEDLDVSGAVDPFDRKRRPNLARWLAFEEQPFDAIVAYRVDRLTRSIRHLQQLVHWAEDHKKLVVSATEAHFDTTTPFAAVVIALMGTVAQMELEAIRERNRSAAHFNIRAGKYRGSLPPWGYLPTRVNGEWRLVPDPVQRERILEVYHRVVDNHEPLHLVAHDLNRRGVLSPRDYFAQLQGREPQGRKWSATALKRSMISGAMLGYATLNGKTVRDDDGAPLVRAEPILTREQLEALRAELAKTSRAKPAVSTPSLLLRVLFCAVCGEPAYKFSGGGRKHPRYRCRSMGFPKHCGNGTVAMVEWDAFCEEQVLDLLGDAERLEKVWVAGSDSAVELAEVNAELVDLTSLIGSPAYRAGSPQREALDARIAALTARQDELKGLEARPSGWEWRETGQRFGDWWREQDTTAKNTWLRSMNVRLTFDVRGGLTRTIDFGDLQEYEQHLRLGGVVERLHTGMS

SEQ ID NO: 12736 - protein, 500 aa, synthetic construct
MRALVVIRLSRVTDATTSPERQLESCQQLCAQRGWDVVGVAEDLDVSGAVDPFDRKRRPNLARWLAFEEQPFDVIVAYRVDRLARSIRHLQQLVHWAEDHKKLVVSATEAHFDTTTPFAAVVIALMGTVAQMELEAIKERSRSAAHFNIRAGKYRGSLPPWGYLPTRVDGEWRLVPDPVQRERILEVYHRVVDNHEPLHLVAHDLNRRGVLSPKDYFAQLRGREPQGRKWSATALKRSMISEAMLGYATLNGKTVRDDDGAPLVRAEPILTREQQEALRAELVKTSRAKPAVSTPSLLLRVLFCAVCGEPAYKFAGGGRKRPRYRCRSMGFPKHCGNGTVAMVEWDAFCEEQVLDLLGDAERLEKVWVAGSDSAVELAEVNAELVDLTSLIGSPAYRAGSPQREALDARIAALAARQEELEGLEARPSGWEWRETGQRFGDWWREQDTAAKNTWLRSMNVRLTFDVRGGLTRTIDFGDLQEYEQHLRLGNMVERLHTGMS

SEQ ID NO: 12737 - protein, 500 aa, synthetic construct
MRALVVIRLSRVTDATTSPERQLESCQQLCAQRGWDVVGVAEDLDVSGAVDPFDRKRRPNLARWLAFEEQPFDVIVAYRVDRLTRSARHLQQLVHWAEDHKKLVVSATEAHFDTTTPFAAVVIALMGTVAQMELEAIKERSRSAAHFNIRAGKYRGSLPPWGYLPTRVDGEWRLVPDPVQRERILEVYHRVVDNHEPLHLVAHDLNRRGVLSPRDYFAQLQGREPQGRKWSATALKRSMTSEAMLGYATLNGKTVRDDDGAPLVRAEPILTREQLEALRAELVKTSRAKPAVSTPSLLLRVLFCAVCGEPAYKFAGGGRKHPRYRCRSMGFPKHCGNGTVAMAEWDAFCVEQVLDLLGDAERLEKVWVAGSDSAVELAEVSAELVDLTSLIGSPAYRAGSPQREALDARIAALAARQEELEGLEARPSGWEWRGTGQRFGDWWREQDTAAKNTWLRSMNVRLTFDVRGGLTRTIDLGDLQEYKQHLRLGSVVERLHTGMS

SEQ ID NO: 12738 - protein, 500 aa, synthetic construct
MRALVVVRLSRVTDATTSPERQLESCQQLCAQRGWDVVGVAEDLDVSGAVDPFDRKRRPNLARWLAFEEQPFDVIVAYRVDRLTRSIRHLQQLVHWAEDHKKLVVSATEAHFDMTTPFAAVVIALMGTVAQMELEAIKERSRSAAHFNIRAGKYRGSLPPWGYLPARVDGEWRLVPDPVQRERILEVYHRVVDNHEPLHLVAHDLNRRGVLSPKDYFAQLRGREPQGRKWSATALKRSMISEAMLGYATLNGKTVRDDDGAPLVRAEPILTREQQEALRAELVKTSRAKPAVSTPSLLLRVLFCAVCGEPAYKFAGGGRKHPRYRCRSMGFPKHCGNGTVAMAEWDAYCEEQVLDLLGDAERLEKVWVAGSDSAVELAEVNAELVDLTSLIGSPAYRAGSPQREALDARIAALAARQEELEGLEARSSGWEWRETGQRFGDWWREQDTVAKNTWLRSMNVRLTFDVRGGLTRTIDFGDLQEYEQHLRLGSVVERLHAGMS

SEQ ID NO: 12739 - protein, 500 aa, synthetic construct
MRALVVIRLSRVTDATTSPERQLESCQQLCAQRGWDVVGVAEDLDVSGAVDPFDRKRRPNLARWLAFEEQPFDVIVAYRVDRLTRSTRHLQQLVHWAEDHKKLVVSATEAHFDTTTPFAAVVIALMGTVAQMELEAIKERSRSAAHFNIRAGKYRGSLPPWGYLPTRVDGEWRLVPDPVQRERILEVYHRVVDNHEPLHLVAHDLNRHGVLSPKDYFAQRQGREPQGRKWSATALKRSMISEAMLGYATLNGKTVRDGDGAPLVRAEPILTREQLEALRAELVKTSRAKPAVSTPSLLLRVLFCAVCGEPAYKFAGGGRKHPRYRCRSMGFPKHCGNGTVAMAEWDAFCEEQVLGLLGDVERLEKVWVAGSDSAVKLAEVNAELVDLTGLIGSPAYRAGSPQREALDARIAALAARQEELEGLEARPSGWEWRGTGQRFGDWWREQDTAAKNTWLRSMNVRLTFDVRGGLTRTIDFGDLQEYEQHLRLGSVVERLHTGMS

SEQ ID NO: 12740 - protein, 500 aa, synthetic construct
MRALVVIRLSRVTDATTSPERQLESCQQLCAQRGWDVVGAAEDLDVSGAVDPFDRKRRPNLARWLAFEEQPFDVIVAYRVDRLTRSIRHLQRLVHWAEDHKKLVVSATEAHFDTTTPFAAVTIALMGTVAQMELEAIKERSRSAAHFNIRAGKYRGSLPPWGYLPTRVDGEWRLAPDPVQRERILEVYHRVVDDHEPLHSVAHDLNRRGVLSPRDYFAQLQGREPRGCKWSATALKRSMISEAMLGYVTLNGKTVRDDDGAPLVRAEPILTREQLEALRAELVKTSRAKPAVSTPSLLLRVLFCAVCGEPAYKFAGGGRKHPRYRCRSMGFPEHCGNGTVAMAEWDAFCEEQVLGLLGDAERLEKVWVAGSDSAVELAEVNAELVDLTSLICSPAYRAGSPQREALDARIAALAARQEELEGLEARPSGWEWRETGQRFGDWWREQGTAAKNTWLRSMNVRLTFDVRGGLTRTIDFGDLQEYVQHLRLGSVAERLHTGMS

SEQ ID NO: 12741 - protein, 500 aa, synthetic construct
MRALVVIRLSRVTDATTSPERQLESCQQLCAQRGWDVVGVAEDLDVSGAVDPFDRKRRPNLARWLAFEEQPFDVIVAYRVDRLARSIRHLQQLVHWAEDHKKLVVSATEAHFDTTTPFAAVVIALMGTVAQMELEAIKERSRSAAHFNIRAGKYRGSLPPWGYLPSRVDGEWRLVPDPVQRERILEVYHRVVDNHESLHLVAHDLNRRGVLSPKDYFAQLQGREPQGRKWSATALKRSMISKAMLGYATLNGETVRDDDGAPLVRAEPILTREQLEALRAELGKTSRAKPAVSTPSLLLRVLFCAVCGEPAYKFAGGGRKHTRYRCRSMGFPKHCGNGTVAMTEWDAFCEEQVLNLLGDAERLEKVWVAGSDSAVELAEVNAELVDLTSLIGSPAYRAGSPQREALDARIAALAARQEELEGLEARPPGWEWRETGQRFGDWWRKQDTAAKNTWLRSMNVRLTFDVRGGLTRTIDFGDLQGYEQNLRLGSVVERLHTGMS

SEQ ID NO: 12742 - protein, 500 aa, synthetic construct
MRALVVIRLSRVTDATTSPERQLESCQQLCAQRGWDVVGVAEDLDVSGAVDPFDRKRRPNLARWLAFEERPFDVIVAYRVDRLARSIRHLQQLVHWAEDHKKLVVSATEAHFDTTTPFAAVVIALMGTVAQMELEAIKERSRSAAHFNIRAGKYRGSLPPWGYLPTRVDGEWRLAPDPVQRERILEVYHRVVDNHEPLHLVAHDLNRRGVLSPRDYFAQLQGREPQGRKWSATALKRSMISEAMLGYATLNGKTVRDDDGAPLVRAEPILAREQLEALRAELVKTSRAKPAVSTPSLLLRVLFCAVCGEPAYKFAGGGRKHPRYRCRSMGFPKHCGNGTVAMAEWDAFCEEQVLDLLGDAERLEKVWVAGSDSAVELAEVNAELVDLTSLIGSPAYRAGSPQREALDARIAALAARQEELEGLEARPSGWEWRETGQRFGDWWREQDTATKNTWLRSMNVRLTFDVRGGLTRTIDFGGLQEYEQHLRLGSVVERLRTGMS

SEQ ID NO: 12743 - protein, 500 aa, synthetic construct
MRTLVVIRLSRVTDATTSPERQLESCQQLCAQRGWDVVGVAEDLDVSGAVDPFDRKRRPNLARWLAFEEQPFDAIVAYRVDRLARSIRHLQQLVRWAEDHKKLVVSATEAHFDTTTPFAAVVIALMGTVAQMELEAIKERNRSAAHFNIRAGKYRGSLPPWGYLPTRVDGEWRLVPDPVQRERILEVYHRVVVNHEPLHLVAHDLNRRGVLSPRDYFAQLRGREPQGREWSATALKRSMISEAMLGYATLNGKTVRDGDGAPLVRAEPILTREQQEALRAELVKTSRAKPAVSTPSLLLRVLFCAVCGEPAYKFAGGGRKHPRYRCRSMGFPKHCGNGTVAMAEWDAFCEEQVLDLLGDAERLEKVWVAGSDSAVELAEVNAELVDLTSLVGSPAYRTGSPQREALDARIAALAARQEELEGLEARPSGWEWRETGQRFGDWWREQDPAAKNTWLRSMNVRLTFDVRGGLTRTIDFGDLQEYEQHLRLGSVVERLHTGMP

SEQ ID NO: 12744 - protein, 500 aa, synthetic construct
MRALVVIRLSRVTDATTSPERQLESCQQLCAQRGWDVVGVAEDLDVSGAVDPFDRKRRPNLARWLAFEEQPFDVIVAYRVDRLARSIRHLQQLVHWAEDHKKLVVSATEAHFDTTTPFAAVVIALMGTVAQMELEAIKERNRSAAHFNIRAGKYRGSLPPWGYLPTRVDGEWRLVPDPVQRERILEVYHRVVNNHEPLHLVAHDLNRRGVLSPKDYFAQLRGREPQGRKWSATALKRSMTSEAMLGYATLNGKTVRDDDGAPLVRAEPILTREQLEAIRAELVKTSRARPAVSTPSLLLRVLFCAVCGEPAYKFAGGGRKHPRYRCRSMGFPKHCGNGTVAMAEWDAFCEEQVLDLLGDAKRLEKVWVAGSDSAVELAEVNAELVDLTSLIGSPAYRAGSPQREALDARIAALAARQEELEGLEARPSGWEWRETGQRFGDWWREQDTAAKNTWLRSMNVRLTFDVRGGLTRTIDFGDLQEYKQHLRLDSVVERLHTGMS

SEQ ID NO: 12745 - protein, 500 aa, synthetic construct
MRVLVVIRLSRVTDATTSPERQLESCQQLCAQRGWDVVGVAEDLDVSGAVDPFDRKHRPNLARWLAFEEQPFDVIVAYRVDRLARSIRHLQQLVHWAEDHKKLVVSATEAHFDTTTPFAAVVIALMGTVAQMELEAIKERSRSAAHFNIRAGKYRGSLPPWGYLPTRVDGEWRLAPDPVQRERILEVYHRVVDDHEPLHLVAHDLNRRGVLSPKDYFAQLRGREPQGRKWSATALKRSMTSEAMLGYATLNGKTVRDDDGAPLVRAEPILTREQQEALRAELVKTSRAKPAVSTPSLLLRVLFCAVCGEPAYKFAGGGRKHPRYRCRSMGFPKHCGNGTVAMAEWDTFCEEQVLDLLGDAERLEKVWVAGSDSAVELAEVNAELVDLTSLIGSPAYRAGSPQREALDARIAALAARQEELEGLEARPSGWEWRETGQRFGDWWREQDTAAKNAWLRSMNVRLTFDVRGGLTRTIDFGDLQEYEQHLRLGSVVERLHTGMS

SEQ ID NO: 12746 - protein, 500 aa, synthetic construct
MRALVVIRLSRVTDATTSPERQLESCQQLCAQRGWDVVGVAEDLDVSGAVDPFDCKRRPNLARWLAFEEQPFDVIVAYRIDRLTRSVRHLQQLVHWAEDHKKLVVSATEAHFDTTTPFAAVVIALMGTVAQMELEAIKERNRSAAHFNIRAGKYRGSLPPWGYLPTRVDGEWRLAPDPVQRERILEVYHRVVDNHEPLHLVAHDLNRRGVLSPKDYFAQLQGREPQGRKWSATALKRSMISEAMLGYATLDGKTVRDDDGAPLVRAEPILTREQQEALRAELAKTSRAKPAVSTPSLLLRVLFCAVCGEPAYKFAGGGRRHPRYRCRSMGFPKHCGNGTVAMAEWDAFCEEQVLNLLGDAERLEKVWVAGSDSAIELAEVNAELVDLTSLIGSPAYRAGSPQREALDARIAALAARQEELEGLEARPSGWEWRETGQRFGDWWREQDTAAKNTWLRSMNVRLTFDVSGGLTRTIDFGDLQEYEQHLRLGSVVGRLHTGMS

SEQ ID NO: 12747 - protein, 500 aa, synthetic construct
MRALVVIRLSRVTDATTSPERQLESCQQLCAQRGWDVVGVAEDLDVSGAVDPFDRKRRPNLARWLAFEEQPFDVIVAYRVDRLARSIRHLQQLVHWAEDHKKLVVSATEAHFDTTTPFAAVVIALMGTVAQMELEAIKERNRSAAHFNIRAGKYRGSLPPWGYLPARVDGEWRLAPDPVQRERILEVYHRVVDNHEPLHLVAHDLNRRGVLSPKDYFAQLQGREPQGRKWSATALKRSMISEAMLGYATLNGKTVRDDDGAPLVRAEPILTREQQEALRAELVKTSRAKPAVSTPSLLLRVLFCAVCGEPAYKFAGGGRKHPRYRCRSMGFPKHCGNGTVAMAEWDAFCEEQVLDLLGDAERLEKVWVAGSGSAVGLAEVNAELMDLTSLIGSPAYRAGSPQREALDARIAALAARQEELEGLEARPSGWEWRGTGQRFGDWWREQDTAAKNTWLRSMNVRLTFDVRGGLTRTIDFGDLQEYVQHLRLGSVVERLHTGMS

SEQ ID NO: 12748 - protein, 500 aa, synthetic construct
MRALVVIRLSRVTDATTSPERQLESCQQLCAQRGWDVVGVAEDLDVSGAVDPFDRKRRPNLARWLAFEEQPFDVIVAYRVDRLTRSTRHLQQLVHWAEDHKKLVVSATEAHFDTTTPFAAVVIALMGTVAQMELEAIKERSRSAAHFNIRAGKYRGSLPPWGYLPTRVDGEWRLAPDPVQRERILEVYHRVVDNHEPLHLVAHDLNRRGVLSPKDYFARLRGREPQGRKWSATALKRSMISEAMLGYATLNGKTVRDDDGAPLVRAEPILTREQLEALRAVLVKTSRAKPAVSNTSLLLRVLFCAVCGEPAYKFAGGGRKHPRYRCRSMGFLKHCGNGTVAMAEWDAFCEEQVLDLLGDAERLEKVWVAGSDSAVELAEVNAELVDLTSLIGSPAYRAGSPQREALDARIAALAARQVELESLEARPSGWEWRGTGQRFGDWWREQDTAAKNTWLRSMNVRLTFDVRGGLTRTIDFGDLQEYEQHLRLGSVVERLHTGMS

SEQ ID NO: 12749 - protein, 500 aa, synthetic construct
MRALVVIRLSRVTDATTSPERQLESCQQLCARRGWGVVGVAEDLDVSGAVDPFDRKRRPNLARWLAFEEQPFDVIVAYRVDRLTRSTRHLQQLVHWAEDHKKLVVSATEAHFDTTTPFAAVVIALMGTVAQMELEAIKERSRSAAHFNIRAGKYRGSLPPWGYLPARVDGVWRLVPDPGQRERILEVYHRVVDNHEPLHLVAHDLNRRGVLSPRDYFAQLQGREPQGRKWSATALKRSMTSEAMLGYATLNGKTVRDDDGAPLVRAEPILTREQLEALRAELVKTSRAKPAVSTPSLLLRVLFCAVCGEPAYKFAGGGRRHSRYRCRSMGFPKHCGNGTVAMAEWDAFCEEQVLNLLGDAERLEKVWVAGSDSAVELAEVNKELVDLTSLIGSPAYRAGSPQREALDARIAALAARQEELEGLEARPSGWEWRGSGQRFGDWWREQDTAAKNTWLRSMNVRLTFDVRGGLTRTIDFGDLQEYEQHLRLGSVVERLHTGMS

SEQ ID NO: 12750 - protein, 500 aa, synthetic construct
MRALVVIRLSRVTDATTSPERQLESCQQLCAQRGWGVVGVAEDLDVSGAVDPFDRKRRPNLARWLAFEEQPFDVIVAYRVDRLTRSVRHLQRLVHWAEDHKKLVVSATEAHFDTTTPFAAVVIALMGTVAQMELEAIKERSRSAAHFNIRAGKYRGSLPPWGYLPARVDGEWRLVPDPVQRGRILEVYHRVVNNHEPLHLVAHDLNRRGVLSPKDYFARLRGREPQGRKWSATALKRSMTSEAMLGYATLNGKTVRDDDGAPLVRAEPILTREQLEALRAELVKTSRAKPAVSTPSLLLRVLFCAVCGEPAYKFAGGGRKHPRYRCRSMGFPKHCGNGTVAMAEWDAFCEEQVLNLLGDAERLEKVWVAGSDSAVELAEVNAELVDLTSLIGSPAYRAGSPQREALDARIAALAARQEELEGLEARPSGWEWRGTGQRFGDWWREQDTAAKNTWLRSMNVRLTFDVRGGLTRTIDFGDLQEYEQHLRLGSVVEHLHTGMS

SEQ ID NO: 12751 - protein, 500 aa, synthetic construct
MRALVVIRLSRVTDATTSPERQLESCQQLCARRGWDVVGVAEDLDVSGAVDPFDRKRRPNLARWLAFEEQPFDVIVAYRVDRLTRSIRHLQQLVHWAEDHKKLVVSATEAHFDTTTPFAAVVIALMGTVAQMELEAIKERSRSAAHFNIRAGKYRGSLPPWGYLPTRVDGEWRLVPDPVQRERILEVYRRVVDNHEPLHLVAHDLNRRGVLSPRDYFAQLRGREPQGRKWSATALKRSMISEAMLGYVTLNGKTVRDDDGAPLVRAEPILTREQLEALRAELVKTSRAKPAVSTPSLLLRVLFCAVCGEPAYKFAGGGRKHPRYRCRSMGFPKHCGNGTVAMAEWDAFCEEQVLNLLGDAERLEKVWVAGSDSAVELAEVNKELVDLTSLIGSPAYRAGSPQREALDARIAALAARQEELEGLEARPSGWEWRGTGQRFGDWWRELDTAAKNTWLRSMNVRLTFDVRDGLTRTIDFGDLQEYERHLRLGSVVERSHTGMS

SEQ ID NO: 12752 - protein, 500 aa, synthetic construct
MRALVVIRLSRVTDATTSPERQLESCQQLCAQRGWDVVGVAEDLDVSGAVDPFDRKRRPNLARWLAFEEQPFDVIVAYRVDRLTRSIRHLQQLVHWAEDHKKLVVSATEAHFDTTTPFAAVAIALMGTVAQMELEAIKERSRSAAHFNIRAGKYRGSLPPWGYLPARVDGEWRLVPDPVQRERILEVYHRVVDDHEPLHLVAHDLNRRGVLSPKDYFAQLRGREPQGRKWSATALKRSMISEAMLGYATLNGKTVRDDDGAPLVRAEPILTREQQEALRAELVKTSRAKPAVSTPSLLLRVLFCAVCGGPAYKFAGGGRKHPRYRCRSMGFPKHCGNGTVAMAEWDAFCEEQVLGLLGDAERLEKVWIAGSDSAVELAEVNAELVDLTSLISSPAYRAGSPQREALDARIAALAARQEELEGLEARPSGWEWHKTGQRFGDWWREQDTTAKNTWLRSMNVRLTFDVRGGLTRTIDFGDLQEYGQHLRLGNAVERLHTGMS

SEQ ID NO: 12753 - protein, 500 aa, synthetic construct
MRALVVTRLSRVTDATTSPERQLESCRQLCAQRGWDVVGVAEDLDVSGAVDPFDRKRRPNLARWLAFEGQPFDVIVAYRVDRLARSIRHLQQLVHWAEDHKKLVVSATEAHFDTTTPFAAVVIALMGTVAQMELEAIKERNRSAAHFNIRAGKYRGSLPPWGYLPTRVDGEWRLVPDPVQRERILEVYHRVVDNHEPLHLVAHDLNRRGVLSPKDYFAQLRGREPQGRKWSATALKRSITSEAMLGYATLNGKTVRDDDGAPLVRAEPILTREQLEALRAELVKTSRAKPAVSTPSLLLRVLFCAVCGEPAYKFAGGGRKHPRYRCRSMGFPKHCGNGTVAMAEWNAFCEEQVLDLLGDAERLEKVWVAGSDSSVELAEVNAELADLTSLIGSPAYRTGSPQREALDARIAALAARQEELEGLEARPSGWEWRETGQRFGDWWREQDTAAKNTWLRSMNVRLTFDVRGGLTRTIDFGDLQEYEQHLRLGSVVERLHTGMP

SEQ ID NO: 12754 - protein, 500 aa, synthetic construct
MRALVVIRLSRVTDATTSPERQLESCQQLCAQRGWDVVGVAGDLDVSGTVDPFDRKRRPNLARWLAFEEQPFDVIVAYRVDRLTRSVRHLQQLVHWAEDHKKLVVSATEAHFDTTTPFAAVVIALMGTVAQMELEAIKERSRSAAHFNIRAGKYRGSLPPWGYLPARVDGEWRLVPDPVQCERILEVYHRVVDNHEPLHLVAHDLNRRGVLSPKDYFAQLRGREPQGRKWSATALKRSMISEAMLGYATLSGKTVRDDDGAPLVRAEPILTREQLEALRAELVKTSRAKPAVSTPSLLLRVLFCAVCGEPAYKFAGGGRKHSRYRCRSMGFPKHCGNGTVAMAEWDAFCEERVLDLLGDAERLEKVWVAGSDSAVELAEVNAELVDLTSLIGSPAYRAGSPQREALDARIAALAARQEELEGLEARPSGWEWRETGQRFGDWWREQDTTAKNTWLRSMNVRLTFDVRGGLTRTIDFGDLQEYEQHLRLGSVVERLHTGMS

SEQ ID NO: 12755 - protein, 500 aa, synthetic construct
MRALVVIRLSRVTDATTSPERQLESCQRLCAQRGWDVVGVAEDLDVSGAVDPFDRKRRPNLARWLAFEEQPFDVIVVYRVDRLTRSIRHLQQLVHWAEDHKKLIVSATEAHFDTTTPFAAVVIALMGTVAQMELEAIKERSRSAAHFNIRAGKYRGSLPPWGYLPTRVDGEWRLAPDPVQRERILEVYHRVVDNHEPLHLVAHDLNRRGVLSPKDYFAQLRGREPQGRKWSATALKRSMISEAMLGYATLNGKIVRDDDGAPLVRAEPILTREQLEALRAELVRTSRAKPAVSTPSLLLRVLFCAVCGEPAYKFAGGGRKHPRYRCRSMGFPKHCGNGTVAMAEWDAFCEEQVLNLLGDAERLEKVWVAGSDFAVELAEVNAELVDLASLIGSPAYRAGSPQREALDARIAALAARQEELEGLEARPSGWEWRETGQRFGDWWREQDTAAKNTWLRSMNVRLTFDVRGGLTRAIDLGDLQEYEQHLRLGSVVERLHTGMS

SEQ ID NO: 12756 - protein, 500 aa, synthetic construct
MRALVVIRLSRVTDASTSPERQLESCQQLCAQRGWDVVGVAEDLDVSGAVDPFDRKRRPNLARWLAFEEQPFDAIVAYRVDRLTRSTRHLQQLVHWAEDHKKLVVSATEAHFDTTTPFAAVVIALMGTVAQMELEAIKERSRSAAHFNIRAGKYRGSLPPWGYLPTRVDGEWRLVPDPVQRERILEVYHRVVDNHEPLHLVAHDLNRRGVLSPRDYFAQLQGREPQGRKWSATALKRSMISEAMLGYATLNGKTVRDDDGAPLVRAEPILTREQQEALRAELVKTSRAKPAVSTPSLLLRVLFCAVCGEPAYKFAGGGRKHPRYRCRSMGFPKHCGNGTVAMAEWDAFCEEQVLDLLGDAERLEKVWVVGSDSAVELAEVNAELVDLTSLIGSPAYRAGAPQREALDARIAALAARQEGLEGLEARPSGWEWRETGQRFGDWWREQDTAARNTWLRTMNVRLTFDVRGGLTRTIDFGDLQEYEQHLRLGSVVERLHTGMS

SEQ ID NO: 12757 - protein, 500 aa, synthetic construct
MRALIVIRLSRVTDATTSPERQLESCQQLCAQRGWDVVGVAEDLDVSGAVDPFDRKRRPNLARWLAFEERPFDVIVAYRVDRLARSIRHLQQLVHWAEDRKKLVVSATEAHFDTTTPFAAVVIALMGTVAQMELEAIKERSRSAAHFNIRAGKYRGSLPPWGYLPTRVDGEWRLVPDPVQRERILEVYHRVVDNHEPLHSVAHDLNRRGVLSPKDYFAQLRGREPQGRKWSATALKRSMISGAMLGYATLNGKTVRDDDGAPLVRAEPILTREQQEALRAELAKASRAKPAVSTPSLLLRVLFCAVCGEPAYKFAGGGRKHPRYRCRSMGFLKHCGNGTVAMAEWDAFCEEQVLDLLGDAERLEKVWVAGSDSAVELAEVNAELMDLTSLIGSPAYRAGSPQREALDARIAALAARQEELEGLEARPSGWEWRGTGQRFGDWWREQDTAAKNTWLRSMNVRLTFDVRGGLTRTIDFGDLQEYVQHLRLGSVVERLHTGMS

SEQ ID NO: 12758 - protein, 500 aa, synthetic construct
MRALVVIRLSRVTDATTSPERQLGSCQQLCAQRGWDVVGVAEDLDVSGAVDPFDRKRRPNLARWLAFEEQPFDVIVAYRVDRLARSIRHLQQLVHWAEDHKKLVVSATEAHFDTTTPFAAVVIALMGTVAQMELEAIKERSRSAAHFNIRAGKYRGSLPPWGYLPSRVDGEWRLVPDPVQRERILEVYHRVVDNHEPLHLVALDLNRRGVLSPKDYFAQLQGREPQGRKWSATALKRSMISEAMLGYATLNGKTVRDDDGAPLVRAEPILTRVQLEALRAELVKTSRAKPAVSTPSLLLRVLFCAVCGEPAYKFAGGGRKHPRYRCRSMGFPKHCGNGTVAMAEWDTFCEEQVLDLLGDVERLEKVWVAGSDSAVKLAEVNAELVDLTGLIGSPAYRAGSPQREALDARIAALAARQEELEGLEARPSGWEWRGTGQRFGDWWREQDTAAKNTWLRSMNVRLTFDVRGGLTRTIDFGDLQEYEQHLRLGSVAERLHTGMS

SEQ ID NO: 12759 - protein, 500 aa, synthetic construct
MRALVVIRLSRVTDATTSPERQLESCQQLCTQRGWDVVGVAEDLDVSGAVDPFDRKRRPNLARWLAFEEQPFDAIVAYRVDRLTRSIRHLQQLVHWAEDHKKLVVSATEAHFDTTTPFAAVVIALMGTVAQMELEAIKERNRSAAHFNIRAGKYRGSLPPWGYLPARVDGVWRLVPDPVQRERILEVYHRVVDKHEPLHLVAHDLNRRGVLSPKDYFAQLQGREPQGRKWSATALKRSMISEAMLGYATLNGRTVRDDDGAPLVRAEPILTREQLETLRAVLVKTSRAKPAVSTPSLLLRVLFCAVCGEPAYKFSGGGRKHPRYRCRSMGFPKHCGNGTVAMAEWDAFCEEQVLGLLGDAERLEKVWVAGSDSAVELAEVNAELVDLTSLIGSPAYRADSPQREALDARIAALAARQEELEGLEARPSSWEWRETGQRFGDWWREQDTAAKNTWLRSMNVRLTFDVRGGLARTIDLGDLQEYEQHLRSGSVVERLHTGMS

SEQ ID NO: 12760 - protein, 500 aa, synthetic construct
MRALVVIRLSRVTDATTSPERQLESCQQLCAQRGWDVVGVAEDLDVSGAVDPFDRKRRPNLARWLAFEEQPFDVIVAYRVDRLTRSTRHLQQLVHWAEDHKKLVVSATEAHFDTTTPFAAVVIALMGTVAQMELEAIKERSRSAAHFNIRAGKYRGSLPPWGYLPTRVDGEWRLVPDPVQRERILEVYHRVVDNHEPLHLVAHDLNRRGVLSPKDYFAQLRGREPQGRKWSATALKRSIISEAMLGYATLDGKTVRDDDGAPLVRAEPILTREQLEALRAELVKTSRAKPAVSTPSLLLRVLFCAVCGEPAYKFSGGGRKHPRYRCRSMGFPKHCGNGTVAMAEWDAFCEEQVLGLLGDAERLEKVWVAGSDSTVELAEVNAELVDLTSLIGSPAYRAGSPQREALDARIAALAARQEELGGLEARPSGWEWRGTGQRFGDWWREQDTAARNTWLRSMNVRLTFDVRGGLTRTIDFGDLQEYEQHLRLGSAVERLHTGMS

SEQ ID NO: 12761 - protein, 500 aa, synthetic construct
MRALVVIRLSRVTDATTSPERQLESCQQLCAQRGWDVVGVAEDLDVSGAVNPFDRKCRPNLARWLAFEEQPFDVIVAYRVDRLTRSVRHLQQLVHWAEDHKKLVVSATEAHFDTTTPFAAVVIALMGTVAQMELEAIRERNRSAAHFNIRAGKYRGSLPPWGYLPARVDGEWRLVPDPVQRERILEVYHRVVDNHEPLHLVAHDLNRRGVLSPKDYFAQLRGREPQGRKWSATALKRSMISEAMLGYATLNGKTVRGDDGAPLVRAEPILTRGQLEALCAELAKTSRAEPAVSTPSLLLRVLFCAVCGEPAYKFSGGGRKHPRYRCRSMGFPKHCGNGTVAVAEWDAFCEEQVLDLLGDAERLEKVWVAGSDSAAELAEVNAELVDLTNLIGSPAYRAGSPQREALDARIAALAARQKELEGLEARPSGWEWRETGQRFGDWWREQDTAAKNTWLRSMNVRLTFDVRGGLTRTVDFGDLQEYEQHLRLGSVVERLHTGMS

SEQ ID NO: 12762 - protein, 500 aa, synthetic construct
MRALVVIRLSRVTDATTSPERQLESCQQLCAQRGWDVVGVAEDLDVSGAVDPFDRKRRPNLARWLAFEEQPFDAIVAYRVDRLTRSIRHLQQLVHWAEDHKKLVVSATEAHFDMATPFAAVVIALMGTVAQMELEAIKERNRSAAHFNIRAGKYRGSLPPWGYLPTRVDGEWRLAPDPVQRERILEVYHRVVDNHEPLHLVAHDLNRRGVLSPRDYFAQLRGREPQGRRWSATALKRSMISEAMLGYATLNGKTVRDDDGAPLVRAEPILTREQLEAFRAELVKTSRAKPAVSTPSLLLRVLFCAVCGEPAYKFAGGGRKHPRYRCRSMGFPKHCGNGTVAMAEWDAFCEEQVLNLLGDAERLEKVWVAGSDSAVELAEVSTELVDLTSLIGSPAYRAGSPQREALDARIAALAARQEELEGLESRPSGWEWRETGQRFGDWWREQDTAAKNTWLRSMNVRLTFDVRGGLTRTIDFGDLQEYKQHLRLGSVVERLHTGMS

SEQ ID NO: 12763 - protein, 500 aa, synthetic construct
MRALVVIRLSRVTDTTTSPERQLESCQQLCAQRGWDVVGVAEDLDVSGAVDPFDRKRRPNLARWLAFEERPFDVIVAYRVDRLARSIRHLQQLVHWAEDRKKLVVSATEAHFDTTTPFAAVVIALMGTVAQMELEAIKERSRSAAHFNIRAGKYRGSLPPWGYLPTRVDGEWRLVPDPVQRERILEVYHRVVDNHEPLHSVAHDLNRRGVLSPKDYFAQLRGREPQGRKWSTTALKRSMISGAMLGYATLNGKTVRDDDGAPLVRAEPILTREQQEALRAELAKASRAKPAVSTPSLLLRVLFCAVCGEPAYKFAGGGRKHPRYRCRSMGFPKHCGNGTVAMAEWDAFCEEQVLNLLGDAERLEKVWVAGSDSAVELAEVNKELVDLTSLIGSPAYRAGSPQREALDARIAALAARQEELEGLEARPSGWEWRGTGQRFGDWWRELDTAAKNTWLRLMNVRLTFDVRDGLTRTIDFGDLQEYEQHLRLGSVVERSHTGMS

SEQ ID NO: 12764 - protein, 500 aa, synthetic construct
MRALVVIRLSRVTDATTSPERQLESCQQLCAQRGWDVVGVAEDLDVSGAVDPFDRKRRPNLARWLAFEEQPFDVIVAYRVDRLTRSTRHLQQLVHWAEDHKKLVVSATEAHFDTTTPFAAVVIALMGTVAQMELEAIKERNRSAAHFNIRAGKYRGSLPPWGYLPTRVDGEWRLVPDPVQRERILEVYHRVVDNHEPLHSVAHDLNRRGVLSPKDYFAQLQGREPRGRKWSATALKRSMISGAMLGYVTLNGKTVRDDDGAPLVRAEPILTREQQEALRAELVRTSRAKPAVSTPSLLLRVLFCAVCGGPAYKFAGGGRRHPRYRCRSMGFPKHCGNGTVAMAEWDAFCEEQVLDLLGDAERLEKVWVAGSDSAVELAEVNAELVDLTSLIGSPAYRAGSPQREALDARIAALAARQEELEGLEARPSGWEWRETGQRFGDWWREQDTAAKNTWLRSMNVRLTFDVRGGLTRTIDFGVLQEYEQRLRLGSVVERLHTGMS

SEQ ID NO: 12765 - protein, 500 aa, synthetic construct
MRALVVIRLSRVTDATTSPERQLESCQQLCAQRGWDVVGVAEDLDVSGAVDPFDRKRRPNLARWLAFEEQPFDVIVAYRVDRLTRSTRHLQQLVHWAEDHKKLVVSATEAHFDTTTPFAAVVIALMGTVAQMELEAIKERSRSAAHFNIRAGKYRGSLPPWGYLPTRVDGEWRLVPDPAQRGRILEVYHRVVDNHEPLHLVAHDLNRRGVLSPRDYFAQLQGREPQGRKWSATALKRSMTSEAMLGYATLNGKTVRDDDGAPLVRAEPILTREQQEALRAELDKTSRAKPAVSTPSLLLRVLFCAVCGEPAYKFAGGGRRHPRYRCRSMGFPKHCGNGTVAMAEWDAFCEEQVLDLLGDAERLEKVWVAGSDSAVELAEVNAELVDLTSLIGSPAYRAGSLQREALDARIAALAARQEELGGLEARLSGWEWRGTGQRFGDWWREQDAAAKNTWLRSMNIRLTFDVRGGLTRTIDFGDLQEYEQHLRLGSVVERLHTGMS

SEQ ID NO: 12766 - protein, 500 aa, synthetic construct
MRALVVIRLSRVTDATTSPERQLESCQQLCAQRGWDVVGVAEDLDVSGAVDPFDRKRRPNLARWLAFEEQPFDVIVAYRVDRLTRSIRHLQQLVHWAEDHKKLVVSATEAHFDTTTPFAAVVIALMGTVAQMELEAIKERSRSAAHFNIRAGKYRGSLPPWGYLPTRVDGEWRLVPDPVQRERILEVYHRVVDNHEPLHLVAHDLNRRGVLSPKDYFAQLRGREPQGRKWSATALKRSMTSEAMLGYATLNGKTVRDDDGAPLVRAEPILTREQLEALRAVLVMTSRAKPAVSTPSLLLRVLFCAVCGEPAYKFAGGGRKHPRYRCRSMGFPKHCGNGTVAMAEWDAFCEEQVLNLLGDAERLEKVWVAGSDSAVELAEVNAELVDLTSLIGSPAYRAGSPQREALDARIAALAARQEELEGLEARPSGWEWRETGQRFGDWWLEQDTAAKNTWLRSMNVRLTFDVRGGLTRTIDLGDLQEYEQHLRLGSVVERLHTGMS

SEQ ID NO: 12767 - protein, 500 aa, synthetic construct
MRALVVIRLSRVTDATTSPERQLESCQQLCAQRGWDVVGVAEDLDVSGAVDPFDRKRRPNLARWLAFEEQPFDVIVAYRVDRLTRSVRHLQQLVHWAGDHKKLVVSATEAHFDTTTPFAAVVIALMGTVAQMELEAIKERSRSAAHFNIRAGKYRGSLPPWGYLPARVDGEWRLVPDPVQRERILEVYHRVVDNHEPLHLVAHDLNRRGVLSPKDYFAQLRGREPQGREWSATALKRSMTSEAMLGYATLNGKIVRDDDGAPLVRAEPILTREQLEALRAELVKTSRAKPAVSAPSLLLRVLFCAVCGEPAYKFAGGGRKHPRYRCRSMGFPKHCGNGTVAMAEWDAFCEEQVLDLLGDAERLEKVWVTGSDSAAELAEVNAELVDLTSLIGSPAYRAGSPQREALDARIAALAARQEELEGLEARPSDWEWRETGQRFGDWWREQDTAAKNTWLRSMNVRLTFDVRGGLTRTIDFGDLQEYEQHLRLGSVVGRLHTGMS

SEQ ID NO: 12768 - protein, 500 aa, synthetic construct
MRALVVIRLSRVTDATTSPERQLESCQQLCAQRGWDVVGVAEDLDVSGAVDPFDRKRRPNLARWLAFEEQPFDVIVAYRVDRLARSIRHLQQLVHWAEDHKKLVVSATEAHFDTTTPFAAVVIALMGTVAQMELEAIKERSRSAAHFNIRAGKYRGSLPPWGYLPTRVDGEWRLVPDPVQRERILEVYHRVVDNHEPLHLVAHDLNRRGVLSPKDYFAQLQGREPQGRKWSATALKRSMTSEAMLGYATLNGKTVRDDDGAPLVRAEPILTREQLEALRAELVKTSRAKPAVSTPSLLLRVLFCAVCGEPAYKFAGGGRKHPRYRCRSMGFPKHCGNGTVAMAEWDAFCEERVLDLLGDAERLEKVWVAGSDSAVELAEVNAELVDLTSLIGSPAYRAGSPQREALDARIAALAARQEKLEGLEARPSGWEWRETGQRFGDWWREQNTAAKNTWLRSMNVRLTFDVRGGLTRTIDFGDLQEYEQHLRLGSVVERLHTGMP

SEQ ID NO: 12769 - protein, 500 aa, synthetic construct
MRALVVIRLSRVTDATTSPERQLESCQQLCAQRGWDVVGVAEDLDVSGAVDPFDRKRRPNLARWLAFEEQPFDVIVAYRVDRLARSIRHLQQLVHWAEDHKKLVVSATEAHFDTTTPFAAVVIALMGTVAQMELEAIKERSRSAAHFNIRAGKYRGSLPPWGYLPTRVDGEWRLMPDPVQRERILEVYRRVVDNHEPLRLVAHDLNRRGVLSPKDYFAQLRGREPQGRKWSATALKRSMTSEAMLGYATLNGKTVRDDDGAPLVRAEPILTREQLEALRAELVKTSRAKPAVSTPSLLLRVLFCAVCGEPAYKFAGGGRKHPRYRCRSMGFSKHCGNGTVAMAEWDAFCEEQVLDLLGDAERLEKVWVAGSDSAVELAEVNAELVDLTSLIGSPAYRAGSSQREALDARIAALAARQGELEGLEARPSGWEWRETGQRFGDWWREQDTAAKNTWLRSMNVRLTFDVRGGLTRTIDFGDLQEYERHLRLGSVVERLHTGMS

SEQ ID NO: 12770 - protein, 500 aa, synthetic construct
MRALVVIRLSRVTDATTSPERQLESCQQLCAQRGWDVVGVAEDLDVSGAVDPFDRKRRPNLARWLAFEEQPFDVIVAYRVDRLARSIRHLQQLVHWAEDHKKLVVSATEAHFDTTTPFAAVVIALMGTVAQMELEAIKERNRSAAHFNIRAGKYRGSLPPWGYLPARVDGEWRLVPDPVQRERILEVYHRVVDNHEPLHLVAHDLNRRGVLSPKDYFAQVQGREPQGRKWSATALKRSMISVAMLGYATLNGKTVRDDDGAPLVRAEPILTREQLEALRAELVKTSRAKPAVSTPSLLLRVLFCAVCGEPAYKFAGGGRKHPRYRCRSMGFPKHCGNGTVAMAGWDAFCEELVLNLLGDAERLEKVWVAGSDSAVELAEVNAELVDLTSLIGSPAYRAGSPQREALDARIAALAARQEELEGLEAHPSGWEWRETGQRFGDWWREQDTAAKNTWLRSMNVRLTFDVRGGLTRTIDFGDLQEYEQHLRLGSVVERSHTGMS

SEQ ID NO: 12771 - protein, 500 aa, synthetic construct
MRALVVIRLSRVTDATTSPERQLESCQQLCAQRGWDVVGVAEDLDVSGAVDPFDRKRRPNLARWLTFEEQPFDVIVAYRVDRLTRSVRHLQQLVHWAEDHKKLVVSATEAHFDTTTPFAAVVIALMGTVAQMELEAIKERSRSAAHFNIRAGKYRGSLPPWGYLPSRVDGEWRLVPDPVQRERILEVYHRVVDNHEPLHLVAHDLNRRGVLSPKDYFAQLQGREPQGRKWSATALKRSMISEAMLGHATLNGKTVRNDDGAPLVRAEPILTREQQEALRAELVKTSRAKPAVSTPSLLLRVLFCAVCGEPAYKFSGGGRKHPRYRCRSMGFPKHCGNGTVAMAEWDAFCEEQVLGLLGDAERLEKVWVAGSDSAVELAEVNAELVDLTSLIGSPAYRAGSPQREALDARIAALAARQEELEGLEARPSGWEWRETGQRFGDWWREQDTAAKNTWLRSMNVRLTFDIRGGLTRTIDFGDLQEYEQHLRLGSVVERLHTGMS

SEQ ID NO: 12772 - protein, 500 aa, synthetic construct
MRALVVIRLSRVTDATTSPERQLESCQQLCAQRGWDVVGVAEDLDVSGAVDPFDRKRRPSLARWLAFEEQPFDAIVAYRVDRLTRSIRHLQQLVHWAEDHKKLVVSATEAHFDTTTPFAAVVIALMGTVAQMELEAIKERNRSAAHFNIRAGKYRGSLPPWGYLPARVDGEWRLVPDPVQRERIFEVYHRVVDNHEPLHLVAHDLNRRGVLSPKDYFAQLQGREPQGRKWSATALKRSMISEAMLGYATLNGKTVRDDDGAPLVRAEPILTRGQLEALRAELVKTSRAKPAVSTPSLLLRVLFCAVCGEPAYKFSGGGRKHPRYRCRSMGFPKHCGNGTVAMAEWDAFCEEQVLDLLGDAERLEKVWVVGSDSAVELAEANAELVDLTSLIGSPAYRAGSPQREALDARIAALAARQEKLEGLEARPSGWEWRETGQRFGDWWREQDTAAKNTWLRSMNVRLTFDVRGGLTRTIDFGDLQEYEQHLRLGSVVERLHTGMS

SEQ ID NO: 12773 - protein, 500 aa, synthetic construct
MRALVVIRLSRVTEATTSPERQLESCQQLCAQRGWDVVGVAEDLDVSGAVDPFDRKRRPNLARWLAFEEQPFDVIVAYRVDRLARSIRHLQQLVHWAEDHKKLVVSATEAHFDTTTPFAAVVIALMGTVAQMELEAIKERSRSAAHFNIRAGKYRGSLPPWGYLPTRVDGEWRLVPDPVQCERILEVYHRVVDNHEPLHLVAYDLNRRGVLSPKDYFAQLQGREPQGRKWSATALKRSMISEAMLGYATLNGKTVRDDDGAPLVRAEPILTRGQQEALRAELVKTSRAKPAVSTPSLLLRVLFCAVCGEPAYKFAGGGRKHPRYRCRSMGFPKHCGNGTVAMAEWDAFCEEQVLDLLGDAERLEKVWVAGSDSAVELAEVNAELVDLTSLIGSPAYRAGSPQREALDARIAVLAARQEELEGLEARPSGWEWRETGQRFGDWWREQDTAAKNTWLRSMNVRLMFDVRGGLTRTIDFGDLQEYEQHLRLGSVVERLHTGMS

SEQ ID NO: 12774 - protein, 500 aa, synthetic construct
MRALVVIRLSRVTDATTSPERQLESCQQLCAQRGWDVVGVAEDLDVSGAVDPFDRKRRPNLARWLAFEERPFDVIVAYRVDRLTRSIRHLQQLVHWAEDHKKLVVSATEAHFDTTTPFAAVVIALMGTVAQMELEAIKERNRSAAHFNIRAGKYRGSLPPWGYLPTRVDGVWRLVPDPVQRERILEVYHRVVDNHEPLHLVAHDLNRRGVLSPKDYFAQLRGREPQGRKWSATALKRSMISVAMLGYATLNGKTVRDDDGAPLVRAEPILTREQLEALRAELVKTSRAKPAVSTPSLLLRVLFCAVCGEPAYKFSGGGRKHPRYRCRSMGFPKHCGNGTVAMAEWDAFCEEQVLDRLGDAERLEKVWVAGSDSAVELAEVNAELVDLTSLIGSPAYRAGSPQREALDARIAALAARQGELEGLEAHPSGWEWRETGQRFGDWWREQDTAAKNTWLRSMNVRLTFDVRGGLTRTIDFGDLQEYEQHLRLGSVVERLHTGMS

SEQ ID NO: 12775 - protein, 500 aa, synthetic construct
MRALVVIRLSRVTDATTSPERQLESCQQLCAQRGWDVVGVAEDLDVSGAVDPFDRKRRPNLARWLAFEEQPFDVIVAYRVDRLARSIRHLQQLVHWAEDHKKLVVSATEAYFDTTTPFAAVVIALMGTVAQLELEAIKERSRSAAHFNIRAGKYRGSLPPWGYLPTRVDGEWRLAPDPVQRERILEVYHRVVDNHEPLHLVTHDLNRRGVLSPKDYFAQLQGREPQGRKWSATALKRSMTSEAMLGYATLNGKTVRDDDGAPLVRAEPILTREQLEALRAELVKTSRAKPAVSTPSLLLRVLFCAVCGEPAYKFSGGGRKHPRYRCRSMGFPKHCGNGTVAMAEWDAFCEEQVLDLLGDAERLEKVWVAGSDSAVELAEVNAELVDLTSLIGSPAYRAGSPQREALDARIAALAARQAELEGLEARPSGWEWRETGQGFGDWWREQDTAAKNTWLRSMNVRLTFDVRGGLTRTIDFGDLQEYEQHLRLGSVVERLHTGMS

SEQ ID NO: 12776 - protein, 500 aa, synthetic construct
MRALVVIRLSRVTDATTSPERQLESCQQLCAQRGWDVVGVAEDLDVSGAVDPFDRKRRPNLARWLAFEEQPFDVIVAYRVDRLTRSTRHLQQLVHWAEDHKKLVVSATEAHFDTTTPFAAVVIALMGTVAQMELGAIKERNRSAAHFNIRAGKYRGSLPPWGYLPTRVDGEWRLAPDPVQRERILEVYHRVVDNHEPLHLVAHDLNRRGVLSPKDYFAQLRGREPQGRKWSATALKRSMISEAMLGYATLNGKTVRDDDGAPLVRAEPILTREQLEALRAELVKTSRAKPAVSTPSLLLRVLFCAVCGEPAYKFAGGGRKHPRYRCRSMGFPKHCGNGTVAMAEWDAFCEEQVLDLLGDAERLEKVWVVGSDSAVELAEVNAELVDLTSLIGSPAYRAGSPQREALDARIAALAARQEELEGLEARPSGWEWRETGQRFGDWWREQDTAAKNTWLRSMNVRLTFDVRGGLTRTIDFGDLHEYEQHLRLGSVAERLHSGMS

SEQ ID NO: 12777 - protein, 500 aa, synthetic construct
MRALVVIRLSRVTDATTSPERQLESCQQLCAQRGWDVVGVAEDLDVSGAVDPFDRKRRPNLARWLAFEEQPFDVIVAYRVDRLARSIRHLQQLVHWAEDHKKLVVSATEAHFDTTTPFAAVVIALMGTVAQMELEAIRERSRSAAHFNIRAGKYRGSLPPWGYLPTRVDGEWRLVPDPVQRERILEVYHRVVDNHEPLHLVAHDLNQRGVLSPKDYFAQLRGREPQGRKWSATALKRSMISEAMLGYATLNGKTVRDDDGAPLVRAEPILTREQLEALRAELVKTSRAKPAVSTPSLLLRVLFCAVCGEPAYKFAGGGRKHPRYRCRSMGFPKHCGNGTVAMAEWDAFCEEQVLDLLGDAERLEKVWVAGSDSAVELAEVNVELVDLTSLIGSPAYRAGSPQREALDARIAALAARQEELEGLRASPSGWEWRETGQRFGDWWREQDAAAKNTWLRSMNVRLTFDVRGGLTRTIDFGDLQEYEQHLRLGSVVERLHTGMS

SEQ ID NO: 12778 - protein, 500 aa, synthetic construct
MRALVVIRLSRVTDATTSPERQLESCQQLCAQRGWDVVGVAEDLDVSGAVDPFDRKRRPNLARWLAFEEQPFDVIVAYRVDRLTRSTRHLQQLVHWAEDHKKLVVSATEAHFDTTTPFAAVVIALMGTVAQMELEAIKERNRSAAHFNIRAGKYRGSLPPWGYLPTRVDGEWRLVPDPVQRERILEVYHRVVDNHEPLHLVAHDLNRRGVLSPRDYFAQLQGREPQGRKWSATALKRSMTSEAMLGYATLNGKTVRGDDGAPLVRAEPILTREQLEALRAELVKTSRAKPAVSAPSLLLRVLFCAVCGEPAYKFAGGGRKHPRYRCRSMGFPKHCGNGTVAMAEWDAFCEEQVLGLLGNAERLKKVWVAGSDSAVELAEVSAELVDLTSLIGSPAYRAGSPQREALDARIAALAARQEELEGLEARPSGWEWRETGQRFGDWWREQDTAAKNTWLRSMNVRLTFDVRGGLTRTIDFGDLQEYEQHLRLGNAVERLHTGMS

SEQ ID NO: 12779 - protein, 500 aa, synthetic construct
MRALVVIRLSRVTDATTSPERQLESCQQLCAQRGWDVVGVAEDLDVSGSVDPFDRKRRPNLARWLAFEKQPFDVIVAYRVDRLARSIRHLQQLVHWAEDHKKLVVSATEAHFDTTTPFAAVVIALMGTVAQMELEAIKERSRSAAHFNIRAGKYRGSLPPWGYLPTRVDGEWRLVPDPVQRERILEVYHRVVDSHEPLHLVAHDLNRRGVLSPRDYFAQLRGREPQGRKWSATALKRSMISEAMLGYATLNGRTVRDDDGAPLVRAEPILTREQLEALRAELVKTSRAKPAVSTPSLLLRVLFCAVCGEPAYKFTGGGRKHPRYRCRSMGFPKHCGNGTVAMAEWDAFCEEQVLDLLGDAERLEKVWVAGSDSAVELAEVNAELVDLTSLIGSPAYRAGSPQREALDARIAALAARQGELEGLEARPPGWEWRETGQRFGDWWREQNTAAKNTWLRSMNVRLTFDVRGGLTRTIDFGDLQEYEQHSRLGSVVERLHTGMS

SEQ ID NO: 12780 - protein, 500 aa, synthetic construct
MRALVVIRLSRVTDATTSPERQLESCRQLCAQRGWSVVGVAEDLDVSGAVDPFDRKRHPNLARWLAFEEQPFDVIVAYRVDRLARSIRHLQQLVHWAEDHKKLVVSATEAHFDTTTPFAAVVIALMGTVAQMELEAIKERNRSAAHFNIRAGKYRGSLPPWGYLPTRVDGEWRLVPDPVQRERILEVYHRVVDNHEPLHLVAHDLNRRGVLSPRDYFAQLQGREPQGRKWSATALKRSMISVAMLGYATLNGKTVRDDDGAPLVRAEPILTRGQLEALRAELVKTSRAKPAVSTPSLLLRVLFCAVCGEPAYKFAGGGRKHPRYRCRSMGFPKHCGNGTVAMAEWDAFCEEQVLGLLGDAERLEKVWVAGSDSAVELAEVNAELVDLTSLIGSPAYRAGSPQREALDARIAALAARQEELEGLEARPSGWEWRETGQRFRDWWREQDTAAKNTWLRSMNVRLTFDVRGGLTRAIDFGDLLEYEQHLRLGSVVERLHTGMS

SEQ ID NO: 12781 - protein, 500 aa, synthetic construct
MRALVVIRLSRVTDATTSPERQLESCQQLCTQRGWDVVGVAEDLDVSGAVDPFDRKRRPNLARWLAFEEQPFDVIVAYRVDRLTRSTRHLQQLVLWADDHKKLVVSATEAHFDTTTPFAAVVIALMGTVAQMELEAIKERSRSAAHFNIRAGKYRGSLPPWGYLPARVDGVWRLVPDPVQRERILEVYHRVVNNHEPLHLVAHDLNRRGVLSPKDYFAQLQGREPQGRKWSATALKRSMISEAMLGYATLNGKTVRDDDGAPLVRAEPILTREQQEALRAELVKTSRAKPAVSTPSLLLRVLFCAVCGEPAYKFAGGGRKHPRYRCRSMGFSKHCGNGTVAMAEWDAFCEEQVLDLLGDAERLEKVWVAGSDSAVELAEVNAELVDLTSLIGSPAYRASSPQREALDARIAALAARQEELEGLEARPSGWEWRETGQRFGDWWREQDTAAKNTWLRSMNVRLTFDVRGGLTRTIDFGDLQEYEQHLRLGSVVERLHTGMS

SEQ ID NO: 12782 - protein, 500 aa, synthetic construct
MRALVVIRLSRVTDATTSPERQLESCQQLCAQRGWDVAGVAEDLDVSGAVDPFDRKRRPNLARWLAFEEQPFDAIVAYRVDRLTRSIRHLQQLVHWAEDHKKLVVSATEAHFDTTTPFAAVVIALMGTVAQMELEAIKERSRSAAHFNIRAGKYRGSLPPWGYLPTRVDGEWRLAPDPVQRERILEVYHRVVDDHEPLHSVAHDLNRRGVLSPRDYFAQLRGREPQGRKWSATALKRSMISEAMLGHATLNGKTVRDENGAPLVRAEPILTREQLEALRAELVKTSRAKPAVSTPSLLLRVLFCAVCGEPAYKFAGGGRKHPRYRCHSMGSPKHCGNGTVAMAEWDAFCEEQVLDLLGDAERLEKVWVAGSDSAVELAEVNAELVDLTGLIGSPAYRAGSPQREALDARITALAARQGELEGLEARPSGWGWRETGQRFGDWWREQDTAAKNTWLRSMNVRLTFDVRGGLTRTIDFGDLQEYEQHLRLGSVVERLHTGMS

SEQ ID NO: 12783 - protein, 500 aa, synthetic construct
MRALVVIRLSRVTDATTSPERQLDACQRLCAQRGWDVVGVAEDLDVSGAVDPFDRKRRPNLARWLAFEEQPFDVIVAYRVDRLTRSIRHLQQLVHWAEDHKKLVVSATEAHFDTTTPFAAVVIALMGTVAQMELEAIKERSRSAAHFNIRAGKYRGSLPPWGYLPARVDGEWRLVPDPVQRERILEVYHRVVDDHEPLHLVAHDLNWRGVLSPKDYFAQLRGREPQGRKWSATALKRSMISEAMLGYATLDGKTVRDDDGAPLVRAEPILTREQLEALRAELVKTPRAKPAVSAPSLLLRVLFCAVCGEPAYKFAGGGRRHPRYRCRSMGFPKHCGNGTVAMAEWDAFCEEQVLNLLGDAERLEKVWVAGSDSAVELAEVNAELVDLTSLIGSPAYRAGSPQREALDARIAALAARQGELEGLEARPSGWEWRGTGQRFGDWWREQDTAAKNTWLRSMNVRLTFDVRGGLTRTIDFGDLQEYEQHLRLGSVVGRLHTGMS

SEQ ID NO: 12784 - protein, 500 aa, synthetic construct
MRALIVIRLSRVTEATTSPERQLESCQQLCAQRGWGVVGVAEDLDVSGAVDPFDRKRRQNLARWLAFEEQPFDVIVAYRVDRLTRSVRHLQRLVHWAEDHKKLVVSATEAHFDTTTPFAAVVIALMGTVAQMELEAIKERSRSAAHFNIRAGKYRGSLPPWGYLPTRVDGEWRLVPDPVQRERILEVYRRAVDNHEPLHLVAHDLNRRGVLSPKDYFAQLRGREPQGRKWSATALKRSMISEAMLGYATLNGKTVRDDDGAPLVRAEPILTREQLEALRAKLVKTSRAKPAVSAPSLLLRVLFCAVCGEPAYKFAGGGRKHPRYRCRSMGFPKHCGNGTVAMAEWDAFCEEQVLDLLGDAERLEKVWVAGSDSAVELAEVNAELVDLTSLVGSPAYRAGSPQREALDARIAALAARQEELEGLEARPSGWEWRGTGQRFGDWWREQDTAAKNTWLRSMNVRLTFDVRGGLTRTIDFGDLQEYEQRSRLGSVVERLHTGMS

SEQ ID NO: 12785 - protein, 500 aa, synthetic construct
MRALVVIRLSRVTDATTSPERQLESCQQLCAQRGWDVVGVAEDLDVSGAVDPFDRKRRPNLARWLAFGEQPFDVIVAYRVDRLARSIRHLQQLVHWAEDHKKLVVSATEAHFDTTTPFAAVVIALMGTVAQMELEAIKERNRSAAHFNIRAGKYRGSLPPWGYLPTRVDGEWRLAPDPVQRERILEVYHRVVDNHEPLHLVAHDLNRRGVLSPKDYFAQLRGREPQGRKWSATALKRSMTSEAMLGYATLNGKTVRDDDGAPLVRAEPILTREQLEALRAELVKTSRAKPAVSTPSLLLRVLFCAVCGEPAYKFAGGGRKHPRYRCRSMGFPKHCGNGTVAMAEWDGFCEEQVLDLLGDAERLEKVWVAGSDSAVEFAEVNAELADLTSLIGSPAYRAGSPQREALDARIAALAARQEELEGLEARPSGWEWRETGQRFGDWWREQDTAAKNTWLRSMNVRLTFDVRGGLTRTIDFGDLQEYEQHLRLGNVVERLHTGMS

SEQ ID NO: 12786 - protein, 500 aa, synthetic construct
MRALVVIRLSRVTDATTSPERQLESCQQLCAQRGWDVVGVAEDLDVSGAVDPFDRKRRPNLARWLAFEEQPFDVIVAYRVDRLARSIRHLQQLVHWAEDHKKLVVSATEAHFDTTTPFAAVVIALMGTVAQMELEAIKERSRSAAHFNIRAGKYRGSLPPWGYLPTRVDGEWRLVPDPVQRERILEVYRRVVDNHEPLHLVAHDLNRRGVLSPRDYFAQLQGREPQGRKWSATALKRSMTSEAMLGYATLSGKTVRDDDGAPLARAEPILTREQLEALRAELVKTSRAKPAVSTPSLLLRVLFCAVCGEPAYKFAGGGRKHPRYRCRSMGFPKHCGNGTVAMAEWDAFCEEQVLDLLGDAERLEKVWVAGTDSAVELAEVNAELVDLTSLIGSPAYRAGSPQREALDARIAALAARQEELEGLEARPSGWEWRETGQRFGDWWREQDTAAKNTWLRSMNVRLTFDVRGGLTRTIDFGDLQEYEQHLRSGSVVERLHSGMS

SEQ ID NO: 12787 - protein, 500 aa, synthetic construct
MRALVVIRLSRVTDATTSPERQLESCQQLCAQRGWDVVGVAEDLDVSGAVDPFDHKRRPNLARWLAFEEQPFDAIVAYRVDRLTRSIRHLQQLVHWAEDHKKLVVSATEAHFDTTTPFAAVVIALMGTVAQMELEAIKERNRSAAHFNIRAGKYRGSLPPWGYLPTRVDGEWRLAPDPVQRERILEVYHRVVDNHEPLRLVAHDLNRRGVLSPRDYFAQLQGREPQGRKWSATALKRSMISEAMLGYATLNGKIVRDDDGAPLVRAEPILTREQLEALRAELAKTSRAKPAVSTPSLLLRVLFCAVCGEPAYKFAGGGRRHPRYRCRSMGFPKHCGNGTVAMAEWDAFCEEQVLNLLGDAERLEKVWVAGSDSAVELAEVNAELVDLTSLIGSPAYRAGSPQREALDARIAALAARQEELEGLEARPSGWEWRGTGQRFGDWWREQDTAAKNTWLRSMNVRLTFDVRGGLTRTIDFGDLQEYEQHLRLGSVVERLHTGMS

SEQ ID NO: 12788 - protein, 500 aa, synthetic construct
MRALVVIRLSRVTDATTSPERQLESCQQLCAQRGWDVVGVAEDLDVSGAVDPFDRKRRPNLARWLAFEEQPFDVIVAYRVDRLARSIRHLQQLVHWAEDRKKLVVSATEAHFDTTTPFAAVVIALMGTVAQMELEAIKERNRSAAHFNIRAGKYRGSLPPWGYLPSRVDGEWRLVPDPVQRERILEVYHRVVDNHEPLHLVAHDLNRRGVLSPRDYFAQLRGREPQGRKWSATALKRSMISEAMLGYATLNGKTVRDDDGAPLVRAEPILTREQLEALRAELVKTSRAKPAVSTPSLLLRVLFCAVCGEPAYKFAGGGRKHPRYRCRSMGFPRHCGNGTVAMAEWDAFCEEQVLNLLGDAERLEKVWVAGSDSAVELAEVNAELEDLTSLIGSPVYRAGSPQREALDARIAALAARQEELEGLEARPSGWEWRETGQRFGDWWREQDTAAKNTWLRSMNVRLTFDVRGGLTRTIDFGDLQEYEQHLRLGSVVERLHTGMS

SEQ ID NO: 12789 - protein, 500 aa, synthetic construct
MRALVVIRLSRVTDATTSPERQLESCQQLCAQRGWDVVGVAEDLDVSGAVDPFDRKRRPNLARWLAFEEQPFDVIVAYRVDRLARSIRHLQQLVHWADDHKKLVVSATEAHFDTTTPFAAVVIALMGTVAQMELEAIKERSRSAAHFNIRAGKYRGSLPPWGYLPARVDGVWRLVPDPVQRERILEVYHRVVNNHEPLHLVAHDLNRRGVLSPKDYFAQLQGREPQGRKWSATALKRSMTSEAMLGYATLNGKTVRDDDGAPLVRAEPILAREQQEALRAELVETSRAKPAVSTPSLLLRVLFCAVCGEPAYKFAGGGRKHPRYRCRSMGFPKHCGNGTVAMAEWDAFCEEQVLGLLGGAERLEKVWVAGSDSAVELAEVNAELVDLTSLIGSPAYRAGSPQREALDARIAALAARQKELEGLEARPSGWEWRETGQCFGDWWREQDTAAKNTWLRSMNVRLTFDVRGELTRTIDFGDLQEYEQHLRLGSVVERLHTGMS

SEQ ID NO: 12790 - protein, 500 aa, synthetic construct
MRALVVIRLSRVTDATTSPERQLESCQQLCAQRGWDVVGVAEDLDVSGAVDPFDRKRRPNLARWLAFEEQPFDVIVAYRVDRLTRSVRHLQQLVHWAEDHKKLVVSATEAHFDTTTPFAAVVTALMGTVAQMELEAIKERSRSAAHFNIRAGKYRGSLPPWGYLPARVDGEWRLVPDPVQRERILEVYHRVVDNHEPLHLVAHDLNRCGVLSPKDYFAQLRGREPQGRKWSATALKRSMISVAMLGYATLCGKTVRDDDGAPLVRAEPILTREQLEALRAELVKTSRAKPAVSTPSLLLRVLFCAVCGEPAYKFAGGGRKHPRYRCRSMGFPKHCGNGTVAMAEWDAFCEEQVLNLLGDAERLEKVWVAGSDSAVELAEVNKELVDLTSLIGSPAYRAGSPQREALDARIAALAARQEELEGLEARPSGWEWRGTGQRFGDWWREQDTAAKNTWLRSMNVRLTFDVRGGLTRTIDFGDLQEYEQHLRLGSVVERLHTGMS

SEQ ID NO: 12791 - protein, 500 aa, synthetic construct
MRALVVIRLSRVTDATTSPERQLESCQQLCAQRGWDVVGVAEDLDVSGAVDPFDRKRRPNLARWLAFEEQPFDAIVAYRVDRLTRSIRHLQQLVHWAEDHKKLVVSATEAHFDTTTPFAAVVIALMGTVAQMELEAIKERSRSAAHFNIRAGKYRGSLPPWGYLPTRVDGEWRLVPDPVQRERILEVYHRVVDNHEPLHLVAHDLNRRGVLSPKDYFAQLRGREPQGREWSATALKRSMISEAMLGYATLNGKTVRDDDGAPLVRAEPILTREQQEALRAELVKTSRAKPAVSTPSLLLRVLFCAVCGEPAYKFAGGGRKHSRYRCRSMGFPKHCGNGTVAMAEWDAFCEEQVLNLLGDAERLEKVWVAGSDSAVKLAEVNAELVDLTSLIGSPAYRAGSPQREALDARIAALAARQEELEGLEARPSGWEWRETGQRFGDWWREQDTAAKNTWLRSMNVRLTFDVRGGLTRTIDFGDLQEYEQHLRLGSVDGRLHTGMS

SEQ ID NO: 12792 - protein, 500 aa, synthetic construct
MRALVVIRLSRVTDATTSPERQLESCQQLCAQRGWDVVGVAEDLDVSGAVDPFDRKRRSNLARWLAFEEQPFDVIVAYRVDRLTRSIRHLQLLVHWAEDHKKLVVSATEAHFDMTTPFAAVVIALMGTVAQMELEAIKERSRSAAHFNIRAGKYRGSLPPWGYLPTRVDGEWRLAPDPVQRERILEVYHRVVDNHEPLHLVAHDLNRRGVLSPKDYFAQLRGREPQGRKWSATALKRSMISEAMLGYATLNGKTVRDDDGAPLVRAEPILTRGQLEALRAELVKTSRAKPAVSTPSLLLRVLFCAVCGEPAYKFAGGGRKHPRYRCRSMGFPKHCGNGTVAMAEWDAFCEEQVLDLLGDAERLEKVWVAGSNSAVELAEVNAELVDLTSLIGSPAYRAGSPQREALDARIAALAARQEELEGLEARPSGWEWRGTGQRFGDWWREQDTAARNTWLRSMNVRLTFDVRGGLTRTIDFGDLQEYEQHLRLGSVDERLHTGMS

SEQ ID NO: 12793 - protein, 500 aa, synthetic construct
MRALVVIRLSRVTDATTSPERQLESCQQLCAQRGWDVVGVAEDLDVSGAVDPFDRKRRPNLARWLAFEEQPFDVIVAYRVDRLARSIRHLQQLVHWAEDHKKLVVSATEAHFDTTTPFAAVVIALMGTVAQMELEAIKERSRSAAHFNIRAGKYRGSLPPWGYLPTRVDGEWRLVPDPVQRERILEVYHRVVDNHEPLHLVAHDLNRRGVLSPRDYFAQLRGREPQGRKWSATALKRSMISGAMLGYATLNGRTVRDDDGAPLVRAEPILTREQLEALRAELVKTSRAKPAVSTPSLLLRVLFCAVCGEPAYKFAGGGRKHPRYRCRSMGFPKHCGNGTVATAEWDAFCEGQVLDLLGDTERLEKVWVAGSDSAIELAEVNAELVDLTSLIGSPAYRAGSQQREALDARIAALAARQEELGGLEARPPGWEWRETGQRFGDWWREQDTAAKNTWLRSMNVRLTFDVRGGLTRTIDFGDLQEYEQHLRLGSVVERLHTGMS

SEQ ID NO: 12794 - protein, 500 aa, synthetic construct
MRALVVIRLSRVTDATTSPERQLESCQQLCAQRGWDVVGVAEDLDVSGAVDPFDRKRRPNLARWLAFGEQPFDAIVAYRVDRLARSIRHLQQLVHWAEDHKKLVVSATEAHFDTTTPFAAVVIALMGTVAQMELEAIKERSRSAAHFNIRAGKYRGSLPPWGYLPARVDGEWRLVPDPVQRERILEVYHRVVDNHEPLHLVAHDLNRRGVLSPKDYFAQLQGREPQGRKWSATALKRSMISEAMLGYATLNGKIVRDDDGAPLVRAEPILTREQLEALRAEFVKTSRAKPAVSTPSLLLRVLFCAVCGEPAYKFAGGGRKHPRYRCRSMGFPKHCGNGTVVMAEWDAFCEEQVLNLLGDAERLEKVWVAGSDSAVELAEVNAELVALTSLIGSPAYRAGSPQREALDARIAALAARQEELEGLEARPSGWEWRETGQRFGDWWREQDTAAKNTWLRSMNVRLTFDVRGGLTRTIDFGDLQEYEQHLRLGSAIERLHTGMS

SEQ ID NO: 12795 - protein, 500 aa, synthetic construct
MRALVVIRLSRVTDATTSPERQLESCQQLCAQRGWDVVGVAEDLDVSGAVDPFDRKRRPNLARWLAFEEQPFDVIVAYRVDRLARSIRHLQQLVHWAEDHKKLVVSATEAHFDTTTPFAAVVIALMGTVAQMELEAIKERSRSAAHFNIRAGKYRGSLPPWGYLPARVDGGWRLVPDPVQRERILEVYHRVVDNHEPLHLVAHDLNRRGVLSPKDYFAQLRGREPQGRKWSATALKRSMISEAMLGYATLNGETVRDDDGAPLVRAEPILTRGQLEALRAELVKTSRAKPAVSTPSLLLRVLFCAVCGEPAYKFAGGGRKHPRYRCRSMGFPKHCGNGTVAMAEWDAFCEEQVLDLLGDAERLEKVWVAGSDSAVELAEVNAELVDLTSLIGSPAYRAGSLQREALDARIAALAARQEELEGSEARPSGWVWRGTGQRFGDWWREQDTAAKNTWLRSMNVRLTFDVRGGLTRTVDPGDLQEYEQHSRLGSVVERLHTGMS

SEQ ID NO: 12796 - protein, 500 aa, synthetic construct
MRALVVIRLSRVTDATTSPERQLESCQQLCAQRGWDVVGVAEDLDVSGAVDPFDRKRRPNLARWLAFEEQPFDVIVAYRVDRLARSIRHLQQLVHWAEDHKKLIVSATEAHFDTTTPFAAVVIALMGTVAQMELEAIKERNRSAAHFNIRAGKYRGSLPPWGYLPARVDGEWRLVPDPVQRERILEVYHRVVDNHEPLHLVAHDLNRCGVLSPRDYFAQLRGREPQGRKWSATALKRSMISEAMLGYATLNGKTVRDDDGAPLVRAEPILTREQLEALRAELVKTSRAKPAVSTPSLLLRVLFCAVCGEPAYKFAGGGRKHPRYRCRSMGFPKHCGNGTVAMAEWDAFCEEQVLDLLGDAERLEKVWVAGSDSAVELAEVNAELVDLTSLIGSPAYRAGSPQREALDARIAALTARQEELEGLEARPSGWEWRVTGQRFGDWWREQDTAAKNTWLRSMNVRLTFDVRGGLTRTIDFGDLQEYEQHLRLGSVVERLHAGMS

SEQ ID NO: 12797 - protein, 500 aa, synthetic construct
MRALVVIRLSRVTDATTSPERQLESCQQLCAQRGWDVVGVAEDLDVSGAVDPFDRKRRPNLARWLAFEEQPFDVIVAYRVDRLTRSTRHLQQLVHWAEDHKKLVASATEAHFDTTTPFAAVVIALMGTVAQMELEAIKERSRSAAHFNIRAGKYRGSLPPWGYLPARVDGEWRLVPDPVQRERVLEVYHRVVDNHEPLHLVAHDLNRRGVLSPKDYFAQLQGREPQGRKWSATALKRSMISGAMLGYATLSGKTVRDDDGAPLERAEPILTREQQEALRAELAKTSRAKPAVSTPSLLLRVLFCAVCGEPAYKFAGGGRKHPRYRCRSMGFLKHCGNGTVAMAEWDAFCEEQVLDLLGDAERLEKVWVAGSDSAVELAEVNAELVDLASLIGSPAYRAGSPQREALDARIAALAARQEELVGLEARPSGWEWRETGQRFGDWWREQDTAAKNTWLRSMNVRLTFDARGGLTRTIDFGDLQEYEQHLRLGSVVERLHTGMS

SEQ ID NO: 12798 - protein, 500 aa, synthetic construct
MRALVVIRLSRVTDTTTSPERQLESCHQLCAQRSWDVVGVAEDLDVSGAVDPFDRKRRPNLARWLAFEERPFDVIVAYRVDRLTRSIRHLQQLVHWAEDHKKLVVSATEAHFDTTTPFAAVVIALMGTVAQMELEAIKERNRSAAHFNIRAGKYRGSLPPWGYLPARVDGEWRLVPDPVQRERILEVYHRVVNNHEPLHLVAHDLNRRGVLSPKDYFAQLRGREPQGRKWSATALKRSMVSEAMLGYATLNGKTVRDDDGAPLVRAEPILTREQLEALRAELVKTSRAKPAVSTPSLLLRVLFCAVCGEPAYKFSGGGRKHPRYRCRSMGLPKHCGNGTVAMAEWDAFCEEQVLDLLGDAERLEKVWVAGSDSAVELAEVNAELVDLTSLTGSPAYRAGSPQREALDARIAALAARQEELEGLEARPSGWEWRETGQRFGDWWREQDTAAKNTWLRSMNVRLTFDVRGGLTRTIDFGDLQEYEQHLRLGSVVERSHAGMS

SEQ ID NO: 12799 - protein, 500 aa, synthetic construct
MRALVVIRLSRVTDATTSPERQLESCQQLCAQRGWDVVGVVEDLDVSGAVDPFDRKRRPNLARWLAFEEQPFDAIVAYRVDRLTRSIRHLQQLVHWAEDHKKLVVSATEAHFDTTTPFAAVVIALMGTVAQMELEAIKERSRSAAHFNIRAGKYRGSLPPWGYLPTRVDGEWRLVPDPVQRERILEVYHRVVDNHEPLYLVAHDLNRRGVLSPKDYFAQLRGREPQGREWSATALKRSMISKAMLGYATLNGKTVRGDDGAPLVRAEPILTREQQEALRAELVKTSRAKPAVSTPSLLLRVLFCAVCGEPAYKFAGGGRKHPRYRCRSMGFPKHCGNGTVAMAEWDAFCEEQVLVLLGDAERLERVWVAGSDSAVELAEVNAELVDLTSLIGSPAYRAGSPQREALDARIAALAARQEELEGLETRPSGWEWRGTGQRFGDWWREQGTAAKNTWLRSMNVRLTFDVRGGLTRTIDFGDLQEYEQHLRLGSVVERLHSGVS

SEQ ID NO: 12800 - protein, 500 aa, synthetic construct
MRALVVIRLSRVTEATTSPERQLESCQQLCAQRGWDVVGVAEDLDVSGAVDPFDRKRRPNLARWLAFEEQPFDVIVAYRVDRLARSIRHLQQLVHWAEDHKKLVVSATEAHFDTTTPFAAVVIALMGTVAQMELEAIKERSRSAAHFNIRAGKYRGSLPPWGYLPTRVDGEWRLVPDPVQRERILEVYHRVVDNHEPLHLVAHDLNRRGVLSPKDYFAQLRGREPQGRKWSATALKRSMISEAMLGYATLNGETVRDDGGAPLVRAEPILTREQLEALRAELVKTSRAKPAVSTPSLLLRVLFCAVCGEPAYKFAGGGRKHPRYRCRSMGFPKHCGNGTVAMAEWDAFCEEQVLDLLGDAERLEKVWVAGSDSAVELAEVNAELVDLASLIGSPAYRAGSPQREALDARIAALAARQEELEGLETRPSGWEWRETGQRFGDWWREQDTAAKNTWLRSMNVRLTFDVRGGLTRTIDFGDLQEYEQHLRLGSVVERLHTGMS

SEQ ID NO: 12801 - protein, 500 aa, synthetic construct
MRALVVIRLSRVTDATTSPERQLESCQQLCAQRGWDVVGVAEDLDVSGAVDPFDRKRRPNLARWLAFEEQPFDAIVAYRVDRLTRSIRHLQQLVHWAEDHKKLVVSATEAHFDTTTPFAAVVIALMGTVAQMELEAIKERNRSAAHFNIRAGKYRGSLPPWGYLPTRVDGEWRLAPDPVQRERILEVYHRVVDNHEPLHLVAHDLNRRGVLSPKDYFAQLRGREPQGRKWSATALKRSMTSEAMLGYATLNGKTVRDDDGAPLVRAEPILTREQLEALRAELDKTSRAKPAVTTPSLLLRVLFCAVCGEPAYKFTGGGRKHPRYRCRSMGFPKHCGNGTVAMVEWDAFCEEQVLDLLGDAERLEKVWVAGSNSAVELAEVNAELVDLTSLIGSPAYRAGSPQREALDARIAALAARQEELEGLEARPSGWEWRGTGQRFGDWWREQDTAAKNTWLRSMNVRLTFDVRGGLTRTVDFGDLQEYEQHLRSGSVVERLHTGMS

SEQ ID NO: 12802 - protein, 500 aa, synthetic construct
MRALVVIRLSRVTDATTSPERQLESCQQLCAQRGWDVVGVAEDLDVSGAVDPFDRKRRPNLARWLAFEGQPFDVIVAYRVDRLARSIRHLQQLVHWAEDHKKLVVSATEAHFDTTTPFAAVVIALMGTVAQMELEAIKERSRSAAHFNIRAGKYRGSLPPWGYLPTRVDGEWRLAPDPVQRERILEVYHRVVDNHEPLHLVAHDLNRRGVLSPKDYFAQLRGREPQGRKWSATALKRSMVSEAMLGYATLNGKTVRDDDGAPLVRAEPILTREQLEALRAELVKTSRAKPAVPTPSLLLRVLFCAVCGEPAYKFSGGGRKHPRYRCRSMGFPKHCGNGTVAMAEWDAFCEEQVLDLLGDAERLEKVWVAGSDSAVELAEVNAELVDLTSLIGSPAYHAGSPQREALDARIAALAARQEELEGLEARPSGWEWRKTGQRFGDWWREQDTAAKNTWLRSMNVRLMFDVRGGLTRTIDFGDLREYEQHLRLGSVVERLHTGMS

SEQ ID NO: 12803 - protein, 500 aa, synthetic construct
MRALVVIRLSRVTDATTSPERQLESCQQLCAQRGWDVVGVAEDLDVSGAVDPFDRKRRPNLARWLAFEEQPFDVIVAYRVDRLARSIRHLQQLVHWAEDHKKLVVSATEAHFDTTTPFAAVVIALMGTVAQMELEAIKERSRSAAHFNIRAGKYRGSLPPWGYLPTRVDGEWRLVPDPVQRERILEVYHRVVDNHEPLHLVAHDLNRRGVLSPKDYFAQLQGREPQGRKWSATALKRSMISGAMLGYATLSGKTVRDDDGAPLVRAEPILTREQLEALRAELVKTSRAKPAVSTPSLLLRVLFCAVCGEPAYKFFGGGRKHPRYRCRSMGFPKHCGNGTVAMAEWDAFCEEQVLDLLGDAERLEKVWVAGSDSAVELAEVNAELVDLTSLIGSPAYRAGSPQREALDARIAALAARQGELEGLEARPSGWEWRETGQRFRDWWREQDTAAKNTWLRSMNVRLTFDVRGGLTRTIDFGDLQEYEQHLRLGSVVECLHTGMS

SEQ ID NO: 12804 - protein, 500 aa, synthetic construct
MRALVVIRLSRVTDATTSPERQLESCQQLCAQRGWDVVGVAEDLDVSGAVDPFDRKRRPNLARWLAFEEQPFDVIVAYRVDRLTRSVQHLQQLVHWAEDHKKLVVSATEAHFDTTTPFAAVVIALMGTVAQMELEAIRERNRSAAHFNIRAGKYRGSLPPWGYLPTRVDGEWRLAPDPVQRERILEVYHRVVDNHEPLHLVAHDLNQRGVLSPRDYFAQLQGREPQGRKWSATALKRSMTSETMLGYATLNGKTVRDDDGAPLVRAEPILTREQLEALRAELVKTSRAKPAVSTPSLLLRVLFCAVCGEPAYKFAGGGRKHPRYRCRSMGFPKHCGNGTIAMAEWDAFCEEQVLDLLGDAERLEKVWVAGSDSAVELAEVNAELVDLTSLIGSPAYRAGSPQREALDARIAALAARQEELEGFEARPSGWEWRETGQRFGDWWHEQDTAAKNTWLRSMNVRLTFDVRGGLTRTIDFGDLQEYEQHLRLGSVVERLHTGMS

SEQ ID NO: 12805 - protein, 500 aa, synthetic construct
MRALVVIRLSRVTDATTSPERQRESCQQLCAQRGWDVVGVAEDLDVSGAVDPFDRKRRPNLARWLAFEEQPFDVIVAYRVDRLTRSTRHLQQLVRWAEDHKKLVVSATEAHFDTTTPFAAVVIALMGTVAQMELEAIKERNRSAAHFNIRAGKYRGSLPPWGYLPTRVDGEWRLVPDPVQRERILEVYHRVVDDHEPLRLVAHDLNRRGVLSPKDYFAQLRGREPQGRKWSATALKRSMISEAMLGHATLNGKTVRDDDGAPLVRAEPILTREQLEALRAELVKTSRAKPAVSTPSLLLRVLFCAVCGEPAYKFAGGGRKHPRYRCRSMGFPKHCGNGTVAMAEWDAFCEEQVLGLLGDVERLEKVWVAGSDSAVKLAEVNAELVDLTGLIGSPAYRAGSPQREALDARIAALAARQEELEGLEARPSGWEWRGTGQRFGDWWREQDTAAKNTWLRSMNVRLTFDVRGGLTRTIDFGDLQEYEQHLRLGSVVERLHTGMS

SEQ ID NO: 12806 - protein, 500 aa, synthetic construct
MRALVVIRLSRVTDATTSPERQLESCQQLCAQRGWDIVGVAEDLDVSGAVDPFDRKRRPNLARWLAFEEQPFDVIVAYRVDRLARSIRHLQQLVHWAEDHKKLIVSATEAHFDTTTPFAAVVIALMGTVAQMELEAIKERSRSAAHFNIRAGKYRGSLPPWGYLPTRVNGEWRLVPDPVQRERILEVYHRVVDDHEPLHLVAHDLNRRGVLSPRDYFAQLQGREPQGRKWSATALKRSMISEAMLGYATLNGKIVRDDDGAPLVRAEPILTREQLEAIRAELVKTSRAKPAVSTPSLLLRVLFCAVCGEPAYKFAGGGRKHPRYRCRSMGFPKHCGNGTVAMAEWDAFCEEQVLDLLGDAERLEKVWVAGSDSAVELAEVNAELVDLTSLIGSPAYRAGSPQREALDARIAALVARQEELEGLEARPSGWEWRGTGQRFGDWWREQDTAAKNTWLRSMNVRLTFDVRGGLTRTIDFGDLQEYVQHLRLGSVVERLHTGMS

SEQ ID NO: 12807 - protein, 500 aa, synthetic construct
MRALVVIRLSRVTDATTSPERQMKSCQQLCAQRGWDVVGVAEDLDVSGAVDPFDRKRRPNLARWLAFEEQPFDAIVAYRVDRLTRSIRHLQLLVHWAEDHKKLVVSATEAHFDTTTPFAAVVIALMGTVAQMELEAIKERSRSAAHFNIRAGKYRGSLPPWGYLPARVDGEWRLAPDPVQRERILEVYHRVVDNHEPLHLVAHDLNRRGVLSPKDYFAQLRGREPQGRKWSATALKRSMISEAMLGYATLNGKTVRGDDGAPLVRAEPILTREQLEALRAELVKTSRAKPAVSTPSLLLRVLFCAVCGEPAYKFAGGGRKHPRYRCRSMGFPKHCGNGTVAMAEWDAFCEEQVLSLLGDAERLEKVWVAGSDTAVELAEVNAELVGLTSLIGSPAYRAGSPQREALDARIAALAARQEELEGLEARPSGWEWRGTGQRFGDWWREQDTAAKNAWLRSMNVRLTFDVRGGLTRTIDFGDLQEYEQHLRLGSVVERLHTGMS

SEQ ID NO: 12808 - protein, 500 aa, synthetic construct
MRALVVIRLSRVTDATTSPERQLESCQQLCAQRGWDVVGVAEDLDVSGAVDPFDRKRRPNLARWLAFEEQPFDVIVAYRVDRLTRSIRHLQQLVHWAEDHKKLVVSATEAHFDTTTPFAAVTIALMGTVAQMELEAIKERSRSAAHFNIRAGKYRGSLPPWGYLPTRVDGEWRLAPDPVQRERILEVYHRVVDDHEPLHSVAHDLNRRGVLSPRDYFAQLQGREPRGRKWSATALKRSMISEAMLGYVTLNSKTVRDDDGAPLVRAEPILTREQLEALRAVLVKTSRAEPAVSTPSLLLRVLFCAVCGEPAYKFAGGGRKHPRYRCRSMGFPKHCGNGTVAMAEWDAFCEEQVLNLLGDAERLEKVWVAGSDSAVELAEVNAELVDLASLIGSPAYRAGSTQREALDARIAALAARQEELEGLEARPSGWEWRETGQRFGDWWREQDTAAKNTWLRSMNVRLTYDVRGGLTRTIDFGDLQEYEQHLRSGSVVERLHTGMS

SEQ ID NO: 12809 - protein, 500 aa, synthetic construct
MRALVVIRLSRVTDATTSPERQLESCQQLCAQRGWDVVGVAEDLDVSGAVDPFDRKRRPNLARWLAFGEQPFDVIVAYRVDRLTRSIRHLQQLVHWAEDHRKLVVSATEAHFDMTTPFAAVVIALMGTVAQMELEAIKERSRSAAHFNIRAGKYRGSLPPWGYLPTRVDGEWRLVPDPVQRERILEVYHRVVDNHEPLHLVAHDLNRRGVLSPKDYFAQLQGREPQGRKWSATALKRSMISEAMLGYATLNGKTVRDDDGAPLVRAEPILTRGQQEALRAELVKTSRAKPAVSTPSLLLRVLFCAVCGEPAYKFAGGGRKHPRYRCRSMGFPKHCGNGTVAMVEWDAFCEEQVLDLLGDAERLEKVWVAGSDSAVELAEVNAELVDLTSLIGSPAYRAGSPQREALDARIAALAARQEELEGLEARPSGWEWRETGQRFGDWWREQDTAAKNTWLRSMNVRLTFDVRSGLTRTIDFGDLQEYEQHLRLGSVVERLHTGMS

SEQ ID NO: 12810 - protein, 500 aa, synthetic construct
MRALVVIRLSRVTDATTSPERQLESCQQLCAQRGWDVVGVAEDLDVSGAVDPFDRKRRPNLARWLAFEEQPFDAIVAYRVDRLTRSIRHLQQLVHWAEDHKKLVVSATEAHFDTTTPFAAVVIALMGTVAQMELEAIKERNRSAAHFNIRAGKYRGSLPPWGYLPTRVDGEWRLVPDPVQRERILEVYHRVVDNHEPLHLVAHDLNRRGVLSPKDYFAQLRGREPQGRKWSATALKRSMISAAMLGYATLNGKTVRDDDGAPLVRAEPILTREQLEALRAELVKTSRAKPAVSTPSLLLRVLFCAVCGEPAYKFAGGGRKHPRYRCRSMGFPKHCGNGTVAMAEWDAFCEEQVLDLLGDAERLEKVWVAGSNSAVELAEVNAELVDLASLIGSPAYRAGSPQREALDARIAALAARQEELEGLEARPSGWEWRGTGQRFGDWWREQDTAAKNTWLRSMNVRLTFDVRGGLTHTIDFGDLQEYEQHSRLGSVVERLHTGMS

SEQ ID NO: 12811 - protein, 500 aa, synthetic construct
MRALVVIRLSRVTDATTSPERQLESCQQLCAQRGWDVVGVAEDLDVSGAVDPFDRKRRPNLARWLAFEEQPFDVIVAYRVDRLTRSTRHLQQLVHWAEDHEKLVVSATEAHFDTTTPFAAVVIALMGTVAQMELEAIKERNRSAAHFNIRAGKYRGSLPPWGYLPTRVDGEWRLVPDPVQRERILEVYHRVVDNHEPLHLVAHDLNRRGVLSPKDYFAQLQGREPQGRKWSATALKRSMTSEAMLGYATLNGKTVRDDDGAPLVRAEPILTREQQEALRAELVKSSRAKPAVSTPSLLLRVLFCAVCGEPAYKFAGGGRKHPRYRCRSMGFPKHCGNGTVAMAEWDAFCEEQVLDLLGDAERLEKVWVAGSDSAVELAEVNAELVDLTSLISSPAYRAGSPQREALDARIAALAARQEELEGLEARPSSWEWRETGQRFGDWWREQDTAAKNTWLRSMNVRLTFDVRGGLTRTIDFGDLQEYEQHLRLGSVVERLHTGMS

SEQ ID NO: 12812 - protein, 500 aa, synthetic construct
MRALVVIRLSRVTDATTSPERQLESCQQLCAQRGWDVVGVAEDLDVSGAVDPFDRKRRPNLARWLAFEEQPFDVIVAYRVDRLTRSIRHLQQLVHRAEDHKKLVVSATEAHFDTTTPFAAVTIALMGTVAQMELEAIKERSRSAAHFNIRAGKYRGSLPPWGYLPTRVDGEWRLAPDPVQRERILEVYHRVVDNHEPLHLVAHDLNRRGVLSPRDYFAQLRGREPQGRKWSATALKRSLISEAMLGYATLNGKTVRDDDGAPLVRAEPILTREQLEALRAELVKTSRAKPAVPTPSLLLRVLFCAVCGEPAYKFAGGGRKHPRYRCRSMGFPKHCGNGTVAMAEWDAFCEEQVLDLLGDAERLEKVWVAGSDSAVELAEVNAELVDPTSLTGSPAYRAGSPQREALDARIAALAARQGELEGLEARPSGWEWRGTGQRFGDWWREQGTAAKNTWLRSMNVRLTFDVRGGQTRMIDFGDLQEYEQHLRSGSVVERLHTRMS

SEQ ID NO: 12813 - protein, 500 aa, synthetic construct
MRALVVIRLSRVTDATTSPERQLESCQQLCAQRGWDVVGVAEDLDVSGAVDPFDRKRRPNLARWLAFEEQPFDVIVAYRVDRLTRSIRHLQQLVHWAEDHKKLVVSATEAHFDMTTPFAAVVIALMGTVAQMELEAIKERSRSAAHFNIRAGKYRGSLPPWGYLPARVDGEWRLVPDPVQRERILEVYRRVVDNHEPLHLVAHDLNRRGVLSPKDYFAQLRGREPQGRKWSATALKRSMTSEAMLGYATLNGKTVRDDDGAPLVRAEPILTREQLEALRVELVKTSRAKPAVSTPSLLLRVLFCAVCGEPAYKFAGGGRKHPRYRCRSMGFPKHCGNGTVAMAEWDAFCEEQVLDLLGDAERLEKVWVAGSDSAVELAEVSAELVDLTSLIGSPAYRAGSPQREALDARIAALAARQEELEGLEARPSGWEWRETGQRFGDWWREQDTAAKNTWLRSMNVRLTFDVRGGLTRTIDFGDLQEYEQHLRLGSVAERLHAGMS

SEQ ID NO: 12814 - protein, 500 aa, synthetic construct
MRALVVIRLSRVTDATTSPERQLESCQQLCAQRGWDVVGVAEDLDVSGAVDPFDRKRRPNLARWLAFEEQPFDVIVAYRVDRLARSIRHLQRLVHWAEDHKKLVVSATEAHFDTTTPFAAVVIALMGTVAQMELEAIKERSRSAAHFNIRAGKYRGSLPPWGYLPTRVDGEWRLVPDPVQRERILEVYHRVVDNHEPLHLVAHDLNRRGVLSPKDYFAQLRGREPQGRKWSATALKRSMTSEAMLGYATLNGKTVRDDDGAPLVRAEPILTREQLEALRAVLVKTSRAKPAVSTPSLLLRVLFCAVCGEPAYKFAGGGRKHPRYRCRSMGFPKHCGNGTVAMAEWDAFCEEQVLDLLGDAERLEKVWVAGSDSAVELAEVNAELVDLTSLIGSPAYRAGSPQREALDARIAALAARQEELEGLEARPPGWEWRETGQRFGDWWREQDTAAKNTWLRSMNVRLTFDVRGGLTRTIDFGDLQEYVQHLRLGGVVERLHTGMP

SEQ ID NO: 12815 - protein, 500 aa, synthetic construct
MRALVVIRLSRVTDATTSPERQLESCQQLCTQRGWDVVGVAEDLDVSGAVDPFDCKRRPNLARWLAFEEQPFDVIVAYRVDRLTRSVRHLQQLVHWAEDHKKLVVSATEAHFDTTTPFAAVVIALMGTVAQMELEAIKERSRSAAHFNIRAGKYRGSLPPWGYLPTRVDGEWRLAPDPVQRERILEVYHRVVDNHEPLHLVAHDLNRRGVLSPKDYFAQLRGREPQGRKWSATALKRSMISEAMLGYATLNGKTVRGDDGAPLVRAEPILTREQLEALRAELVKTSRAKPAVSTPSLLLRVLFCAVCGEPAYKFAGGGRKHPRYRCRSMGFPKHCGNGTVAMAEWDAFCEEQVLDLLGDAERLEKVWVAGSDSAVELAEVNAELVDLTSLIGSPAYRAGSPQREALDARIAALAARQEELEGLEARPSGWEWRGTGQRFGDWWREQDTAAKNTWLRSMNVRLTFDVRGGLTRTIDLGDLQEYEQHLRLGSVVERSHTGMP

SEQ ID NO: 12816 - protein, 500 aa, synthetic construct
MRALVVIRLSRVTDATTSPERQLESCQQLCAQRGWDVVGVAEDLDVSGAVDPFDRKRRPNLARWLAFEEQPFDVIVAYRVDRLTRSVRHLQQLVHWAEDHKKLVVSATEAHFDTTTPFAAVVIALMGTVAQMELEAIKERIRSAAHFNIRAGKYRGSLPPWGYLPTRVDGEWRLVPDPVQRERILEVYHRVVDNHEPLHLVAHDLNRRGVLSPKDYFAQLQGREPQGRKWSATALKRSMISEAMLGHATLNGKTVRDDDGAPLVRAEPILTREQQEALRAELVKTSRAKPAVSTPSLLLRVLFCAACGEPAYKFSGGGRKHPRYRCRSMGFPKHCGNGTVAMAEWDAFCEEQVLGLLGDAERLEKVWVAGSDSAVELAEVNAELVDLTSLIGSPAYRAGSPQREALDARIAALAARQEELEGLEARPSGWEWRETGQRFGDWWREQDTAAKNTWLRSMNVRLTFDVRGGLTRTIDFGDLQEYEQHLRLGSVVERLHTGMS

SEQ ID NO: 12817 - protein, 500 aa, synthetic construct
MRALVVIRLSRVTDATTSPERQLESCQQLCAQRGWDVVGVAEDLDVSGAVDPFDRKRRPNLARWLAFEEQPFDVIVAYRVDRLARSIRHLQQLVHWAEDHKKLVVSATEAHFDTTTPFAAVVIALMGTVAQMELEAIKERSRSAAHFNVRAGKYRGSLPPWGYLPTRVDGEWRLVPDPVQRERILEVYRRVVDNHEPLHLVAHDLNRRGVLSPRDYFAQLQGREPQGRKWSATALKRSMISGAMLGYATLNGKTVRDDDGAPLVRAEPILTRGQLEALRAELVKTSRAKPAVSTPSLLLRVLFCAVCGEPAYKFAGGGRKHPRYRCRSMGFPKHCGNGTVAMAEWDAFCEEQVLDLLGDAERLEKVWVAGSDSAVELAEVNAELVDLTGLIGSPAYRAGSPQREALDARIAALAARQEELEGLEARPSGWEWRETGQRFGDWWREQDTAAKNTWLRSMNVRLTFDVRGGLTRTIDFGDLLEYKQHLRLGSVVERLHTGMS

SEQ ID NO: 12818 - protein, 500 aa, synthetic construct
MRALVVIRLSRVTDATTSPERQLESCQQLCAQRGWDVVGVAEDLDVSGAVDPFDRKRRPSLARWLAFEEQPFDVIVAYRVDRLTRSIRHLQQLVHWAGDHKKLVVSATEAYFDTTTPFAAVVIALMGTVAQMELEAIKERSRSAAHFNIRAGKYRGSLPPWGYLPTRVDGEWRLAPDPVQRERILEVYHRVVDNHEPLHLVAHDLNRRGVLSPKDYFAQLQGREPQGRKWSATALKRSMTSEAMLGYATLNGKTVRDDDGAPLVRAEPILTREQLEALRAELVKTSRAKPAVSTPSLLLRVLFCAVCGEPAYKFSGGGRKHPRYRCRSMGFPKHCGNGTVAMAEWDAFCEEQVLDLLGDAERLEKVWVAGSDSAVELAEVNAELVDLTSLIGSPAYRAGSPQREALDARIAALAARQEELGGLEARPSGWEWRETGQRFRDWWREQDTAAKNTWLRSMNVRLTFDVRGGLTRTIDFGDLQEYVQHLRLGSVVERLHAGMS

SEQ ID NO: 12819 - protein, 500 aa, synthetic construct
MRALVVIRLSRVTDATTSPERQLESCRQLCAQRGWDVVGVAEDLDVSGAVDPFDRKRRPNLARWLAFEEQPFDVIVAYRVDRLARSIRHLQQLVHWAEDHKKLVVSATEAHFDTTTPFAAVVIALMGTVAQMELEAIKERNRSAAHFNIRAGKYRGSLPPWGYLPTRVDGEWRLAPDPVQRERILEVYHRVVDNHEPLHLVAHDLNRRGVLSPKDYFAQLRGREPQGRKWSATALKRSMISEAMLGYATLNGKTVRDDNGAPLVRAEPILTREQQEALRAELVKTSRMKPAVSTPSLLLRVLFCAVCGEPAYKFSGGGRKHPRYRCRSMGYPRHCGNGTVAMAEWDAFCEEQVLDLLGDAERLEKVWVAGSDSAVELAEVNAELVDLTSLIGSPAYRAGSPQREALDARIAVLAARQEELEGLEARPSGWEWRGTGQRFGDWWREQDTAAKNTWLRSMNVRLTFDVRGGLTRTIDFGDLQEYEQHLRLGSEVERLHTGMS

SEQ ID NO: 12820 - protein, 500 aa, synthetic construct
MRALVVIRLSRVTDATTSPERQLESCQQLCAQRGWDVVGVAEDLDVSGAVDPFDRKRRPNLARWLAFEEQPFDVIVAYRVDRLTRSIRHLQQLVHWAEDHKKLVVSATEAHFDTTTPFAAVVIALMGTVAQMELEAIKERNRSAAHFNIRAGKYRGSLPPWGYLPTRVDGVWRLVPDPVQRERILEVYHRVVDNHEPLHLVAHDLNRRGVLSPKDYFAQLRGREPQGRKWSATALKRSMTSVAMLGHATLSGKTVRDDDGAPLVRAEPILTREQLEALRAELVKTSRAKPAVSTPSLLLRVLFCAVCGEPAYKFAGGGRKHSRYRCRSMGFPKHCGNGTVAMAEWDAFCEEQVLDLLGDSERLEKVWVAGSDSAVELAEVNAELVDLTSLIGSPAYRAGSSQREALDARIAALAARQEELEGLEARPSGWEWRETGQRFVDWWREQDTAAKNTWLRSMNVRLTFDVRGGLTRTIDFGDLQEYEQHLRLGSVVGRLHTGMS

SEQ ID NO: 12821 - protein, 500 aa, synthetic construct
MRALVVIRLSRVTDATTSPERQLESCQQLCAQRGWDVVGVAEDLDVSGAVDPFDRKRRPNLARWLAFEEQPFDVIVAYRVDRLTRSIRHLQQLVHWAEDHKKLVVSATEAHFDTTTPFAAVVIALMGTVAQMELEAIKERSRSAAHFNIRAGKYRGSLPPWGYLPARADGEWRLVPDPVQRERILEVYHRVVVNHEPLHLVAHDLNRRGVLSPKDYFAQLRGREPQGRKWSATALKRSMISEAMLGYATLNGKTVRDDDGAPLVRAEPILTREQQEALRAELVKTSRAKPAVSTPSLLLRVLFCAVCGEPAYKFSGGGRKHPRYRCRSMGFPKHCGNGTVAMAEWDAFCEEQVLDLLGDAERLEKVWVAGSDSAVELAEVNAELVDLTSLIGSPAYRAGSPQREALDARIAALAARQEELEGLEARPSGWEWRETGQRFGDWWREQDTAAKNTWLRSMNVRLAFDVRGGLTRTIDFGDLQEYEQHSRLGSVVERLHTGMS

SEQ ID NO: 12822 - protein, 500 aa, synthetic construct
MRALVVIRLSRVTDATTSPERQLESCQQLCAQRGWDIVGVAEDLDVSGAVDPFDRKRRPNLARWLAFEEQPFDVIVAYRVDRLTRSIRHLQQLVHWAEDHKKLIVSATEAHFDTTTPFAAVVIALMGTVAQMELEAIKERSRSAAHFNIRAGKYRGSLPPWGYLPARVDGEWRLVPDPVQRERILEVYHRVVVDHEPLHLVAHDLNRRGVLSPKDYFAQLRGREPQGRKWSATALKRSMISEAMLGYATLNGKTVRDDDGAPLVRAEPILTREQQEALRAELVKTSRAKPAVSTPSLLLRVLFCAVCGEPAYKFAGGGRKHPRYRCRSMGFPKHCGNGTVAMAEWDAFCEEQVLGLLGDAERLEKVWIAGSDSAVELAEVNAELVDLTSLIGSPAYRAGSPQREALGARIAALAARQEELEDLEARPSGWEWRETGQRFGDWWREQDTAAKNTWLRSMNVRLTFDVRGGLTRTIDFGDLQEYEQHLRLGSVVERLHTGMS

SEQ ID NO: 12823 - protein, 500 aa, synthetic construct
MRALVVVRLSRVTDATTSPERQLESCQQLCAQRGWDVVGVAEDLDVSGAVDPFDRKRRPNLARWLAFEEQPFDVIVAYRVDRLARSIRHLQQLVHWAGDHKKLVVSATEAHFDTTTPFAAVVIALMGTVAQMELEAIKERSRSAAHFNIRAGKYRGSLPPWGYLPTRVDGEWRLVPDPVQRERILEVYHRVVDNHEPLHLVAHDLNRRGVLSPRDYFAQLRGREPQGRKWSATALRRSMISEAMLGYATLNGRTVRDDDGAPLVRAEPILTREQQEALRAELVKTSRAKPAVSTPSLLLRVLFCAVCGEPAYKFAGGGRKHPRYRCRSMGSPKHCGNGTVAMAEWDAFCEEQVLDLLGDAERLEKVWVAGSDSAVELAEVNAELVDLTSLIGSQAYRAGSPQRETLDARIAALAARQEELEGLGARPSGWEWRETGQRFGDWWREQNTAAKNTWLRSMNVRLTFDVRGGLTRTIDFGDLQEYEQHLRLGSVVERLHTGMS

SEQ ID NO: 12824 - protein, 500 aa, synthetic construct
MRALVVIRLSRVTDATTSPERQLESCQQLCAQRGWGVVGVAEDLDVSGAVDPFDSKRRPNLARWLAFEEQPFDVIVAYRVDRLTRSVRHLQQLVHWAEDHKKLVVSATEAHFDTTTPFAAVVIALMGTVAQMELEAIKERNRSAAHFNIRAGKYRGSLPPWGYLPTRVDGEWRLVPDPVQRERILEVYHRVVGNHEPLHLVAHDLNRRGVLSPKDYFAQLRGREPQGRKWSATALKRSMISEAMLGYATLNGKTVRDDDGAPLVRAEPILTREQLEALRAELVKTSRAKPAVSTPSLLLRVLFCAVCGEPAYKFAGGGRKHPRYRCRSMGFPKHCGNGTVAMAEWDAFCEEQVLDLLGDAELLEKVWVAGSDSAIELAEVNAELVDLTSLTGSPAYRAGSPQREALDARIAALAARQEELEGLEARPSGWEWRETGQRFGDWWREQDTAAKNTWLRSMNVRLTFDVSGGLTRTIDFGDLQEYEQHLRLGSVVERLHTGMS

SEQ ID NO: 12825 - protein, 500 aa, synthetic construct
MRALVVIRLSRVTDATTSPERQLESCQQLCAQRGWDVVGVAEDLDVSGAVNPFDRKRRPNLARWLASEEQPFDVIVAYRVDRLTRSTRHLQQLVHWAEDHKKLVVSATEAHFDTTTPFAAVVIALMGTVAQMELEAIKERSRSAAHFNIRAGKYRGSLPPWGYLPTRVDGEWRLVPDPVQRERILEVYHRVVDNHESLHLVAHDLNRRGVLSPKDYFAQLQGREPRGRKWSATALKRSMISEAMLGYVTLNGKTVRNDDGAPLVRAEPILTREQLEALRAELAKTSRAKPAVSTPSLLLRVLFCAVCGEPAYKFAGGGRKHPRYRCRSMGFPKHCGNGTVAMAEWDAFCEEQVLDLLGDAERLEKVWVAGSDSAVELAEVNAELVDLTSLIGSPAYRAGSPQREALDARIAALAARQEELEGLEARPSGWEWRETGQRFGDWWREQDTAAKNTWLRSMNVRLTFDVRGGLTRTIDFGDLREYEQHLRLGSVVERLHTGMS

SEQ ID NO: 12826 - protein, 500 aa, synthetic construct
MRALVVIRLSRVTDATTSPERQLESCQQLCAQRGWGVVGVAEDLDVSGAVDPFDSKRRPNLARWLAFEEQPFDVIVAYRADRLTRSVRHLQQLVHWAEDHKKLVVSATEAHFDTTTPFAAVVIALMGTVAQMELEAIRERNRSAAHFNIRAGKYRGSLPPWGYLPTRVDGEWRLVPDPVQRERILEVYHRVVDNHEPLHLVAHDLNRRGVLSPKDYFAQLRGREPQGRKWSATALKRSMISEAMLGYATLNGKIVRDDDGAPLVRAEPILTREQLEALRAELVKTSRAKPAVSTPSLLLRVLFCAACGEPAYKFAGGGRKHPRYRCRSMGFPKHCGNGTVAMAEWDAFCEEQVLGLLGDAERLEKVWVAGSDSAVELAEVNAELVDLTSLIGSPAYRAGSPQREALDARIAALAARQEELEGLEARPPGWEWRETGQRFGDWWREQDTAAKNTWLRSMNVRLTFDVRGGLTRTIDFGDLQEYEQHLRLGSVVKRLHTGMS

SEQ ID NO: 12827 - protein, 500 aa, synthetic construct
MRALVVIRLSRVTDATTSPERQLESCQQLCAQRGWDVVGVAEDLDVSGAVDPFDRKRRPNLARWLAFEEQPFDVIVAYRVDRLTRSVRHLQQLVHWAEDHKKLVVSATEAHFDTTTPFAAVVIALMGTVAQMELEAIKERNRSAAHFNIRAGKYRGSLPPWGYLPTRVDGEWRLAPDPVQRERILEVYHRVVDNHEPLHLVAHDLNRRGVLSPRDYFAQLQGREPQGRKWSATALKRSMISEAMLGYATLNGKTVRDDDGAPLVRAEPILTREQLEALRAELVKTSRAKPAVSTPSLLLRVLFCAVCGEPAYKFAGGGRKHPRYRCRSMGFPKHCGNGTVAMAEWDAFCEEQVLDLLGDTERLEKVWVAGSDSAVELAEVSAELVDLTSLIGSPAYRAGSPQREALDARIAALAARQEELEGLEARPSGWEWRETGQRFGDWWREQDTAAKNTWLRSMNVRLTFDVRGGLTRTIDFGDLQENEQHLRLGSVVEHLHTGMS

SEQ ID NO: 12828 - protein, 500 aa, synthetic construct
MRALVVIRLSRVTDATTSPERQLESCQQLCAQRGWDVVGVAEDLDVSGAVDPFDRKRRPNLARWLAFEEQPFDVIVAYRVDRLTRSVRHLQQLVHWAEDHKKLVVSATEAHFDTTTPFAAVVIALMGTVAQMELEAIKERNRSAAHFNIRAGKYRGSLPPWGYLPTRVDGEWRLAPDPVQRERILEVYHRVVDNHEPLHSVAHDLNRRGVLSPKDYFAQLQGREPQGRKWSATALKRSMISGAMLGYATLNGKTVRDDDGVPLVRAEPILTREQLEALRAELVKTSRAKPAVSTPSLLLRVLFCAVCGEPAYKFAGGGRKHPRYRCRSMGFPKHCGNGTVAMAEWDAFCEEQVLDLLGDAERLEKVWVAGSDSAVELAEVNAELVDLTSLIGSPAYRAGSPQREALDARIAALAARQEELEGLEARPTGWEWRGTGQRFGDWWREQDTAAKNAWLRSMNVRLTFDVRGGLTRTIDFGDLQEYEQHLRLGGVVERLHTGVS

SEQ ID NO: 12829 - protein, 500 aa, synthetic construct
MRALVVIRLSRVTEATTSPERQLESCQQLCAQRGWDVVGVAEDLDVSGAVDPFDRKRRPNLARWLAFEEQPFDVVVAYRVDRLTRSVRHLQRLVHWAEDHKKLVVSATEAHFDTTTPFAAVVIALMGTVAQMELEAIKERSRSAAHFNIRAGKYRGSLPPWGYLPTRVDGEWRLVPDPVQRERILEVYHRVVDNHEPLHLVAHDLNRRGVLSPKDYFAQLQGREPQGRKWSATALKRSMISEAMLGYATLNGKTVHDDDGAPLVRAEPILTREQREALRAELVKTSRAKPAVSTPSLLLRVLFCAVCGEPAYKFAGGGRKHPRYRCRSMGFPKHCGNGTVAMAEWDAFCEEQVLDLLGDAERLEKVWVAGSDSAVELAEVNAELVDLTSLIGSPAYRAGSPQREALDARIAALAARQEELEGLEARPSGWEWRETGQRFGDWWREQDTAAKNTWLRSMNVRLTFDVRGGLTRTIDLGDLQEYEQHLRLGSVVERLHTEMS

SEQ ID NO: 12830 - protein, 500 aa, synthetic construct
MRALAVIRLSRVTDATTSPERQLESCQQLCAQRGWDVVGVAEDLDVSGAVNPFDRKRRPNLARWLAFEEQPFDVIVAYRVDRLTRSIRHLQQLVHWAEDHKKLVVSATEAHFDTTTPFAAVVIALMGTVAQMELEAIKERNRSAAHFNIRAGKYRGSLPPWGYLPARVDGEWRLVPDPVQRERILEVYHRVVDNHEPLHSVAHDLNRRGVLSPKDYFAQLRGREPQGRRWSATALKRSMISEAMLGYATLNGKTVRDEDGAPLVRAEPILTRGQLEALRAELVKTSRAKPAVSTPSLLLRVLFCAVCGEPAYKFAGGGRKHPRYRCRSMGFPKHCGNGTVAMAEWDAFCEEQVLDLLGDTERLEKVWVAGSDSAIELAGVNAELVDLTSLIGSPAYRAGSLQREALDARIAALAARQEELEGLEARPSGWEWRETGQRFGDWWREQDTAAKNTWLRSMNVRLTFDVRGGLTRTIDFGDLQEYEQHLRLGSVVERLRTGMS

SEQ ID NO: 12831 - protein, 500 aa, synthetic construct
MRALVVIRLSRVTDATTSPERQLESCQQLCAQRGWDVVGVAEDLDVSGAVDPFDRKRRPNLARWLAFEEQPFDVIVAYRVDRLTRSTRHLQRLVHWAEDHKKLVVSATEAHFDTTTPFAAVVIALMGTVAQMELEAIKERSRSAAHFNIRAGKYRGSLPPWGYLPTRVDGEWRLVPDPVQRERILEVYHRVVDNHEPLHLVAHDLNRRGVLSPKDYFAQLRGREPQGRKWSATALKRSMISEAMLGYATLNGKTVRDDDGAPLVRAEPILTREQLEALRAELVKTSRAKPAVSTPSLLLRVLFCAVCGEPAYKFAGGGRKHPRYRCRSMGFPKHCGNGTVAMAEWDAFCEEQVLDLLGDAERLEKVWVAGSDSAVELAEVNAELVDLTSLIGSPAYRAGSPQREALDARIAALAARQEELEGLEARPSGWEWRGTGQRFGDWWREQDTAAKNTWLRSMNVRLTFDVRGGLTRTIDFGDLREYEQHLRLGSVVERLHTGMS

SEQ ID NO: 12832 - protein, 500 aa, synthetic construct
MRALVVVRLSRVTDATTSPERQLESCQQLCAQRGWDVVGVAEDLDVSGAVDPFDRKRRPNLARWLAFEEQPFDVIVAYRVDRLARSIRHLQQLVHWAGDHEKLVVSATEAHFDTTTPFAAVVIALMGTVAQMELEAIKERSRSAARFNIRAGKYRGSLPPWGYLPTRVDGEWRLVPDPVQRERILEVYHRVVDNHEPLHLVAHDLNRRGVLSPRDYFAQLRGREPQGRKWSATALKRSMISEAMLGYATLNGRTVRDDDGAPLVRAEPILTREQLEALRAELVKTSRAKPAVSTPSLLLRVLFCAVCGEPAYKFAGGGRKHPRYRCRSMGFPKHCGNGTVAMAEWDAFCEEQVLDLLGDAERLEKVWVAGSDSAVELAEVNAELVDLTSLIGSQAYRAGSPQRGALDARIAALAARQEELEGLGARPSGWEWRETGQRFGDWWREQNTAAKNTWLRSMNVRLTFDVRGGLTRTIDFGDLQEYEQHLRSGSGVERLHTGMS

SEQ ID NO: 12833 - protein, 500 aa, synthetic construct
MRALVVIRLSRVTDATTSPERQLESCQQLCAQRGWDVVGVAEDLDVSGAVDPFDRKRRPNLARWLAFEEQPFDVIVAYRVDRLARSIRHLQQLVHWAEDHKKLVVSATEAHFDTTTPFAAVVIALMGTVAQMELEAIKERSRSAAHFNIRAGKYRGSLPPWGYLPTRMDGEWRLVPDPVQRERILEVYHRVVDNHEPLHLVAHDLNRRDVLSPKDYFAQLQGREPQGRKWSATALKRSMISVAMLGYATLNGKTVRDDDGAPLVRAEPILTREQLEALRAELVKTSRAKPAVSTPSLLLRVLFCAVCGEPAYKFAGGGRKHPRYRCRSMGFPKHCGNGTVAMAEWDAFCEEQVLGLLGDVERLEKVWVAGSDSAVELAEVNAELVDLTSLIGSPAYRAGSPQREALDARIAALAARQEELEGLEARPSGWEWRGTGQRFGDWWREQDTAAKNTWLRSMNVRLTFDVRGGLTRTIDFGDLQEYEQHLRLGSVVERLHPGMS

SEQ ID NO: 12834 - protein, 500 aa, synthetic construct
MRALVVIRLSRVTDATTSPERQLESCQQLCAQRGWDVVGVAEDLDVSGAVDPFDRKRRPNLARWLAFEGQPFDVIVAYRVDRLARSIRHLQQLVHWAEDHKKLVVSATEAHFDTTTPFAAVVIALMGTVAQMELEAIKERSRSAAHFNIRAGKYRGSLPPWGYLPARVDGEWRLVPDPVQRERILEVYHRVVDKHEPLHLVAHDLNRRGVLSPRDYFAQLQGREPQGRKWSATALKRSMISEAMLGYATLNGKTVRDDDGAPLVRAEPILTREQREALRAELVKTSRAKPAVSTPSLLLRVLFCAVCGEPAYKFAGGGRKHPRYRCRSMGFPKHCGNGTVAMAVWDAFCEEQVLGLLGDAERLEKVWVAGSDSAVELAEVNAELVDLTSLIGSPAYRAGSPQREALDARVAALAARQEELEGLEARPSGWEWRETGQRFGDWWREQDTAAKNTWLRSMNVRLTFDVRGELTRTIDFGDLQEYEQHLRSGGVVERLHTGMS

SEQ ID NO: 12835 - protein, 500 aa, synthetic construct
MRALVVIRLSRVTDATTSPERQLESCQQLCAQRGWDVVGVAEDLDVSGAVDPFDRKRRPNLARWLAFEEQPFDVIVAYRVDRLTRSTRHLQQLVHWAEDHKKLVVSATEAHFDTTTPFAAVVIALMGTVAQMELEAIKERSRSAAHFNIRAGKYRGSLPPWGYRPARVDGEWRLVPDPVQRERILEVYHRVVDNHESLHLVAHDLNRRGVLSPKDYFAQLQGREPQGRKWSVTALKRSMISEAMLGYVTLNGKTVRDDDGAPLVRAEPILTREQQEALRAELAKTSRAKPVVSTPSLLLRVLFCAVCGEPAYKFAGGGRKHPRYRCRSMGFPKHCGNGTVAMAEWDAFCEEQVLGLLGDTERLERVWVAGSDSAAELAEVYAELVDLTSLIGSPAYRAGSPQRGALDARIAALAARQEELEGLEARPSGWEWRETGQRFGDWWREQDTAAKNTWLRSMNVRLTFDVRGGLTRTIDFGDLQEYERHLRLGSVVERLHTGMS

SEQ ID NO: 12836 - protein, 500 aa, synthetic construct
MRALVVIRLSRVTDATTSPERQLESCQQLCAQRGWDVVGVAEDLDVSGAVDPFDRKRRPNLARWLAFEEQPFDVIVAYRVDRLTRSIRHLQQLVHWAEDHKKLVVSATEAHFDMTTPFAAVVIALMGTVAQMELEAIKERSRSAAHFNIRAGKYRGSLPPWGYLPTRVDGEWRLVPDPVQRERILEVYHRVVDNHEPLHSVAHDLNRRGVLSPRDYFAQLRGREPQGREWSATALKRSMISEAMLGYATLNGKIVRDDDGAPLVRAEPILTREQLEALRAELVKTSRAKPAVSTPSLLLRVLFCAVCGEPAYKFAGGGRKHPRYRCRSMGFPKHCGNGTVAMAEWDAFCEEQVLDLLGDVERLEKVWVAGSDSAVELAEVNAELTDLTSLIGSPAYRVGSPQREALDARIAALAARQEELEGLEARPSGWEWRETGQRFGDWWRKQDTAAKNAWLRSMNVRLTFDVRGGLTRTIDFGDLQEYEQRLRLGSVVERLHTGMS

SEQ ID NO: 12837 - protein, 500 aa, synthetic construct
MRALVVIRLSRVTDATTSPERQLESCQQLCAQRGWDVVGVAEDLDVSGAVDPFDRKRRPNLARWLAFEEQPFDVIVAYRVDRLTRSTRHLQQLVHWAEDHKKLVVSATEAHFDTTTPFAAVVIALMGTVAQMELEAIKERSRSAAHFNIRAGKYRGSLPPWGYLPARVDGEWRLVPDPVQRERILEVYHRVVDNHEPLHLVAHDLNRRGVLSPKDYFAQLQGREPRGRKWSATALKRSMISEAMLGYATLNGKTVRDDDGAPLVRAEPILTREQLEALRAELAKTSRAKPAVSTPSLLLRVLFCAVCGEPAYKFAGGGRKHPRYRCRSMGFPKHCGNGTVAMAEWDAFCEEQVLDLLGDAERPEKVWIAGSDSAVELAEVSAELVDLTGLIGSPAYRAGSPQREALDARIAALAARQEELEGSEARPSGWEWRVTGQRFGDWWREQDTAAKNTWLRSMNVRLTFDVRGGLTRTIDFGDLQEYEQHLRSGSVVERLHTGMS

SEQ ID NO: 12838 - protein, 500 aa, synthetic construct
MRALVVIRLSRVTDATTSPERQLESCQQLCAQRGWDVVGVAEDLNVSGAVDPFDRERRPNLARWLAFEEQPFDVIVAYRVDRLTRSIRHLQQLVHWAEDHKKLVVSATEAHFDTTTPFAAVVIALMGTVAQMELEAIKERNRSAAHFNIRAGKYRGSLPPWGYLPTRVDGEWRLVPDPVQRERILEVYHRVLDNHEPLHLVAHDLNRRGVLSPRDYFAQLQGREPQGRKWSATALKRSMTSEAMLGYATLNGKIVRDDDGAPLVRAEPILTREQLEALRAELVKTSRAKPAVSTPSLLLRVLFCAVCGEPAYKFAGGGRKHPRYRCRSMGFPKHCGNGTVAMTEWDASCEEQVLNLLGDAERLEKVWVAGSDSAVELAEVNAELVDLTSLIGSPAYRAGSPQREALDARIAALAARQEELEGLEARPSGWEWRGTGQRFGDWWREQDTAAKNAWLRSMNVRLTFDVRGGLTRTIDFGDLQEYEQRLRLGSVVERLHTGMS

SEQ ID NO: 12839 - protein, 500 aa, synthetic construct
MRALVVIRLSRVTDATTSPERQLESCQQLCAQRGWDVVGVAEDLDVSGAVDPFDRKRRPNLARWLAFEEQPFDVIVAYRVDRLARSIRHLQQLVHWAEDHKKLVVSATEAHFDTTTPFAAVVIALMGTVAQMELEAIKERTRSAAHFNIRAGKYRGSLPPWGYLPTRVDGEWRLVPDPMQRERILEVYHRVVDNHEPLHSVAHDLNRRGVLSPKDYFAQLQGREPQGRKWSATALKRSMISEAMLGHATLNGKIVRDDDGAPLVRAEPILTREQLEALRAELVKTSRAKPAVSTPSLLLRVLFCAVCGEPAYKFAGGGRKHPRYRCRSMGFPKHCGNGTVAMAEWDAFCEEQVLDLLGDAERLEKVWVAGSDSAVELAEVNAELVDLTSLIGSPAYRAGSPQREALDARIAALAARQEELGGLEARPSGWEWRETGQRFGDWWRGQDTVAKNTWLRSMNVRLTFDVRGGLTRTIDFGDLQEYEQHLRLGSVVERLHTGMS

SEQ ID NO: 12840 - protein, 500 aa, synthetic construct
MRALVVIRLSRVTDATTSPERQLESCQQLCAQRGWDVVGVAEDLDVSGAVDPFDRKRRPNLARWLAFEEQPFDVIVAYRVDRLARSIRHLQRLVHWAEDHKKLVVSATEAHFDTTTPFAAVVIALMGTVAQMELEAIKERNRSAAHFNIRAGKYRGSLPPWGYLPARVDGEWRLVPDPVQRERILEVYHRVVDDHEPLHLVAHDLNRRGVLSPRDYFAQLQGREPQGREWSATALKRSMISGAMLGYATLNGKTVRDDDGAPLVRAEPILTREQQEALRAELVKTSRARPAVSTPSLLLRVLFCAVCGEPAYKFAGGGRKHPRYRCRSMGFPKHCGNGTVAMAEWDAFCEEQVLDLLGDAERLEKVWVAGSDSAVELAEVNAELVDLTSLIGSPAYRAGSPQREALDARIAALAARQEELEGLEARPSGWEWRETGQRFGDWWREQDTAAKNTWLRSMNVRLTFDVRGGLTRTIDFGDLQEYVQHLRLGSVVERLHTGMS

SEQ ID NO: 12841 - protein, 500 aa, synthetic construct
MRALVVIRLSRVTDATTSPERQLESCQQLCAQRGWDVVGVAEDLDVSGAVDPFDRKRRPNLARWLAFEEQPFDVIVAYRVDRLSRSTRHLQQLVHWAEDHKKLVVSATEAHFDTTTPFAAVVIALMGTVAQMELEAIKERTRSAAHFNIRAGKYRGSLPPWGYLPARVDGEWRLAPDPVQRERILEVYHRVVDNHEPLHLVAHDLNRRGVLSPRDYFAQLRGREPQGRKWSATALKRSMISEAMLGYATLNGKTVRDDDGAPLVRAEPILTREQLGALRAELVKTSRAKPAVSTPSLLLRVLFCAVCGEPAYKFAGGGRKHPRYRCRSMGFPKHCGNGTVAMAEWDAFCEEQVLNLLGGAERLEKVWVAGSDPAVELAEVNAELVDLTSLIGSPAYRAGSPQREALDARIAALAARQEGLEGLEARPSGWEWRETGQRFRDWWREQGTAAKNTWLRSMNVRLTFDVRGGLTRTIDFGDLQEYEQHLRLGSVAERLHTGMS

SEQ ID NO: 12842 - protein, 500 aa, synthetic construct
MRALVVIRLSRVTDATTSPERQLESCQQLCAQRGWDVVGVAEDLDVSGAVDPFDRKRRPNLARWLAFEEQPFDAIVAYRVDRLTRSIRHLQQLVHWAEDHKKLVVSATEAHFDMTTPFAAVVIALMGTVAQMELEAIKERNRSAAHFNIRAGKYRGSLPPWGYLPTRVDGEWRLAPDPVQRERILEVYHRVVDNHEPLHLVAHDLNRRGVLSPRDHFAQLRGREPQGRRWSATALKRSMISEAMLGYATLNGKTVRDDDGAPLVRAEPILTREQLEAFRAELVKTSRAKPAVSTPSLLLRVLFCAVCGEPAYKFAGGGRKHPRYRCRSMGFPKHCGNGTVAMAEWDAFCEEQVLDLLGDAERLEKVWVAGSDSAVELAEVSAELMDLTSLIGSPAYRAGSPQRGALDARIAALAARQEELEGLEARPSGWEWRETGQRFGDWWREQDTAAKNTWLRSMSVRLTFDVRGGLTRTIDFGDLQEYERHPRLGSVVERLHTGMS

SEQ ID NO: 12843 - protein, 500 aa, synthetic construct
MRALVVIRLSRVTDATTSPERQLESCQQLCAQRGWDVVGVAEDLDVSGAVDPFDRKRRPNLARWLAFEGQPFDVIVAYRVDRLARSIRHLQQLVHWAEDHKKLVVSATEAHFDTTTPFAAVVIALMGTVAQMELEAIKERNRSAAHFNIRAGKYRGSLPPWGYLPTRVDGEWRLVPDPVQRERILEVYHRVVDNHEPLHLVAHDLNRRGVLSPRDYFAQLQGREPQGRKWSATALKRSMISEAMLGYATLNGKIVRDDDGAPLVRAEPILTREQQEALRAELVKTSRAKPAVSTPSLLLRVLFCAVCGEPAYKFAGGGRKHPRYRCRSMGFPKHCGNGTVAMAEWDAFCEEQVLNLLGDAERLERVWVAGSDSAVELAEVNAELVDLTSLIGSPAYRAGSPQREALDARIAALAARQEELEGLEARPSGWEWRETGQRFGDWWREQGTAAKNTWLRSMNVRLTFDVRGGLTRTIDFGDLQEYEQHLRLGSVVERLHTGMS

SEQ ID NO: 12844 - protein, 500 aa, synthetic construct
MRALVVIRLSRVTDATTSPERQLESCQQLCAQRGWDVVGVAEDLDVSGAVDPFDRKRRPNLARWLAFEEQPFDVIVACRVDRLTRSIRHLQQLVHWAEDHKKLVVSATEPHFDTTTPFAAVVIALMGTVAQMELEAIKERSRSAAHFNIRAGKYRGSLPPWGYLPARVDGEWRLEPDPVQRERILEVYHRVVDNHEPLHLVAHDLNRRGVLSPRDYFAQLQGREPQGRKWSATALKRSMISKAMLGYATLNGKIVRDDDGAPLVRAEPILTCEQLEALRAELVKTSRAKPAVSTPSLLLRVLFCAVCGEPAYKFAGGGRRHPRYRCRSMGFPKHCGNGTVAMAEWDAFCEEQVLDLLGDAERLEKVWVAGSDSAVELAEVNAELVDLTSLIGSPAYRAGSPQREALDARIAALAARQEGLGGLEARPSGWEWRETGQRFGDWWREQDTAAKNTWLRSMNVRLTFDVRGGLTRTIDFGDLQEYEQHLRLGSVVERLHTGMS

SEQ ID NO: 12845 - protein, 500 aa, synthetic construct
MRALAVIRLSRVTDATTSPERQLESCQQLCAQRGWDVVGVAEDLDVSGAVDPFDRKRRPNLARWLAFEEQPFDVIVAYRVDRLARSIRHLQQLVHWAEDHKKLVVSATEAHFDTTTPFAAVVIALMGTVAQMELEAIKERSRSAAHFNIRAGKYRGSLPPWGYLPTRVDGEWRLVPDPVQRERILEVYHRVVDNHEPLHLVAHDLNRRGVLSPRDYFAQLRGREPQGREWSATALKRSMTSEAMLGYVTLNGKTVRDDDGAPLVRAEPILTREQLEALRAELVKTSRAKPAVSTPSLLLRVLFCAVCGEPAYKFAGGGRKHSRYRCRSMGFPKHCGNGTVAMAEWDAFCEERVLELLGDAERLEKVWVAGSDSAVELAEVNAELVDLTSLIGSPAYRAGSPQREALDARIAALAARQGELEGLEARPSGWEWRGTGQRFGDWWREQDTAAKNTWLRSMNVRLTFDVRGGLTRTIDFGDLQEYEQHLRLGSVVERLHTGMS

SEQ ID NO: 12846 - protein, 500 aa, synthetic construct
MRALVVIRLSRVTDATTSPERQLESCQQLCAQRGWDVVGVAEDLDVSGAVDPFDRKRRPNLARWLAFEEQPFDVIVAYRVDRLTRSTRHLQQLVRWAEDHKKLVVSATEAHFDTTTPFAAVVIALMGTVAQMELEAIKERNRSAAHFNIRAGKYRGSLPPWGYLPTRVDGEWRLVPDPVQRERILEVYRRVVDNHEPLHLVAHDLNRRGVLSPKDYFAQLRGREPQGRKWSATALKRSMISEAMLGYATLNGKTVRDDDGAPLVRAEPILTREQLEALRAELVKTSRAKPAVSTPSLLLRVLFCAVCGEPAYKFAGGGRKHPRYRCRSMGFPKHCGNGTVAMAEWDAFCEEQVLGLLGDAERLEKVWVAGSDSAVELAEVNAELVDLTSLIGSPAYHAGSPQREALDARIAALAARQEELEGLEARPSGWEWRETGQRFGDWWREQDTAAKNTWLRSMNVRLTFDVRGGLTRTIDFGDLQEYEQHLRLGSVVERLHTGMS

SEQ ID NO: 12847 - protein, 500 aa, synthetic construct
MRALVVIRLSRVTDATTSPERQLESCQQLCAQRGWDVVGVAEDLDVSGTVDPFDRKRRPNLARWLAFEEQPFDVIVAYRVDRLTRSVRHLQQLVHWAEDHKKLVVSATEAHFDTTTPFAAVVIALMGTVAQMELEAIKERNRSAAHFNIRAGKYRGSLPPWGYLPARVDGVWRLVPDPVQRERILEVYHRVVDNHEPLHSVAHDLNRRGVLSPKDYFAQLRGREPQGRKWSATALKRSMISEAMLGYATLNGKTVRDDDGAPLVRAEPILTREQLEALRAELVKTSRAKPAVSTPSLLLRVLFCAVCGEPAYKFAGGGRKHPRYRCRSMGFPKHCGNGTVAMAEWDAFCEEQVLDLLGDAERLEKVWVAGSDSAVELAEVNAELVDLTSLISSPAYRAGSPQREALDARIAALAARQEELEGLEARPSGWEWRETGQRFGDWWREQDTAAKNTWLRSMNVRLTFDVRGGLTRTIDFGDLQEYEQHLRLGSVVERLHTGMS

SEQ ID NO: 12848 - protein, 500 aa, synthetic construct
MRALVVIRLSRVTDATTSPERQLESCQQLCAQRGWDVVGVAEDLDVSGAVDPFDRKRRPNLARWLTFEEQPFDVIVAYRVDRLTRSTRHLQQLVHWAEDHKKLVVSATEAHFDTATPFAAVVIALMGTVAQMELEAIKERSRSAAHFNIRAGKYRGSLPPWGYLPTRVDGEWRLVPDPVQRERILEVYHRVVDNHEPLHLVAHDLNRRGVLSPKDYFAQLRGREPQGRKWSATALKRSMISEAMLGYVTLNGKTVRDDGGAPLVRAEPILTREQLEALRAELVKTSRAEPAVSTPSLLLRVLFCAVCGEPAYKFAGGGRKHPRYRCRSMGFPKHCGNGTVAMAEWDAFCEEQVLDLLGDAERLEKVWVAGSDSAVELAEVNAELVDLTSLIGSPAYRAGSPQREALDARIAALAARQEELKGLEARPSGWEWRETGQRFGDWWREQDTAAKNTWLRSMNVRLTFDVRGGLSRTIDFGDLQEYEQHLRLGSVVERLHTGMS

SEQ ID NO: 12849 - protein, 500 aa, synthetic construct
MRALVVIRLSRVTDATTSPERQLESCRQLCAQRGWDVVGVAEDLDVSGAVDPFDRKRRPNLARWLAFEEQPFDVIVAYRIDRLTRSIRHLQQLVHWAEDHKKLVVSATEAHFDTTTPFAAVVIALMGTVAQMELEAIKERNRSAAHFNIRAGRYRGSLPPWGYLPARVDGEWRLVPDPVQRERILEVYHRVVDNHEPLHLVAHDLNRRGVLSPKDYFAQLRGREPQGRKWSATALKRSMISEAMLGYATLNGKTVRDEDGAPLVRAEPILTREQLEALRAELVKTSRAKPAVSTPSLLLRVLFCAVCGEPAYKFAGGGRKHPRYRCRSMGFPKHCGNGTVAMAEWDAFCEEQVLDLLGDAERLEKVWVAGSDSAVELAEVNAELVDLASLIGSPTYRTGSPQREALDARIAALAARQEELEGLEARPSGWEWRETGQRFGDWWREQDTAAKNTWLRSMNVRLTFDVRGGLTRTIDFGDLQEYEQHSRLGSEVERLRTGMS

SEQ ID NO: 12850 - protein, 500 aa, synthetic construct
MRALVVIRLSRVTDATTSPERQLESCQQLCAQRGWDVVGVAEDLDVSGAVDPFDRKRRPNLARWLAFEEQPFDVIVAYRVDRLTRSTRHLQQLVRWAEDHKKLVVSATEAHFDTTTPFAAVVIALMGTVAQMELEAIKERNRPAAHFNIRAGKYRGSLPPWGYLPTRVDGEWRLVPDPVQRERILEVYRRVVDNHEPLHLVAHDLNRRGVLSPKDYFAQLRGREPQGRKWSATALKRSMISEAMLGYATLNGKTVRDDDGAPLVRAEPILTRGQLEALRAELVKTSRAKPAVSTPSLLLRVLFCAVCGEPAYKFAGGGRKHPRYRCRSMGFPKHCGNGTVAMAEWDAFCEEQVLNLLGDAERLEKVWVAGSDSAVELAEVNAELVDLTSLIGSPAYRAGSLQREALDARIAALAARQEELGGLEARPSGWEWRETGQRFGDWWREQDTAAKNTWLRSMNVRLTFDVRGGLTRTIDFGDLQEYEQHLRSGSVVERLHTGMS

SEQ ID NO: 12851 - protein, 500 aa, synthetic construct
MRALVVIRLSRVTDATTSPERQLESCQQLCAQRGWDVVGVAEDLDVSGAVDPFDRKRRPNLARWLAFEEQPFDVIVAYRVDRLARSIRHLQQLVHWAEDHKKLVVSATEAHFDTTTPFAAVVIALMGTVAQMELEAIKERNRSAAHFNIRAGKYRGSLPPWGYLPTRVDGEWRLVPDPVQRERILEVYHRVVDNHEPLHLVAHDLNRRGVLSPRDYFAQLQGREPQGRKWSATALKRSMTSEAMLGYATLNGKTVRDDDGAPLVRAEPILTREQLEALRAELVKTSRAKPAVSTPSLLLRVLFCAVCGEPAYKFAGGGRKHPRYRCRSMGFPKHCGNGTVAMAEWDAFCEEQVLDLLGDAERLEKVWVAGSDSAVELAEVNAELVDLTSLIGSPAYRAGSPQREALDARIAALAARQEELEGLEARPSGWEWRETGQRFGDWWREQDTAAKNAWLRSMNVRLTFDVRGGLTRTIDFGDLQEYEQRLRLGSVAERLHTGMS

SEQ ID NO: 12852 - protein, 500 aa, synthetic construct
MRALVVIRLSRVTDTTTSPERQLESCQQLCAQRGWDVVGVAEDLDVSGAVDPFDRKRRPNLARWLAFEEQPFDVIVTYRVDRLARSIRHLQQLVHWAEDHKKLVVSATEAHFDTTTPFAAVVIALMGTVAQMELEAIKERSRSAAHFNIRAGKYRGSLPPWGYLPTRVDGEWRLVPDPVQRERILEVYHRVVDNHEPLHLVVHDLNRRGVLSPKDYFAQLQGREPQGRKWSATALKRSMISEAMLGYATLNGETVRGDDGAPLVRAEPILTRGQLEALRAELVKTSRAKPAVSAPSLLLRVLFCAVCGEPAYKFAGGGRKHPRYRCRSMGFPKHCGNGTVAMAEWDAFCEEQVLDLLGDAERLEKVWVAGSDSAVELAEVNAELVDLTSLIGSPAYRAGSPQRKALDARIAVLAARQEELEGLEARPSGWEWRGTGQRFGDWWREQDTAAKNTWLRSMNVRLTFDVRGGLTRTIDFGDLQEYEQHLRLGSVVERLHTGMS

SEQ ID NO: 12853 - protein, 500 aa, synthetic construct
MRALVVIRLSRVTDATTSPERQLESCQQLCAQRGWDVVGVAEDLDVSGAVDPFDRKRRPNLARWLAFEEQPFDVIVAYRVDRLARSIRHLQQLVHWAEDHKKLVVSATEAHFDTTTPFAAVVIALMGTVAQMELEAIKERNRSAAHFNIRAGKYRGSLPPWGYLPTRVNGEWRLAPDPVQRERILEVYHRVVDNHEPLHLVAHDLNRRGVLSPKDYFAQLQGREPQGRKWSATALKRSMISEAMLGYATLNGRTVRDDDGAPLVRAEPILTREQLEALRAELVKTSRAKPAVSTPSLLLRVLFCAVCGEPAYKFAGGGRKHPRYRCRSMGFPKHCGNGTVAMAEWDAFCEEQVLGLLGDAERLEKVWVAGSDSAVELAEVNAELVDLTSLIGSPAYRAGSPQREALDARIAALAARQEELEGLEARPSGWEWRETGQRFGDWWREQDTAAKNTWLRSMNVRLTFDVRGGLTRTIDFGDLQEYEQHLRLGSVVERLHTGMP

SEQ ID NO: 12854 - protein, 500 aa, synthetic construct
MRALVVIRLSRVTDATTSPERQLESCQQLCAQRGWDVVGVAEDLDVSGAVDPFDRKRRPNLARWLAFEEQPFDVIVAYRVDRLTRSVRHLQQLVHWAEDHKKLVVSATEAHFDTTTPFAAVVIALMGTVAQMELEAIKERSRSAAHFNIRAGKYRGSLPPWGYLPARVDGEWRLVPDPVQRERILEVYHRVVDNHEPLHSVAHDLNRRGVLSPKDYFAQLRGREPQGREWSATALKRSMTSVAMLGYATLNGKTVRDDDGAPLVRAEPILTREQLEALRAELVKTSRAKPAVSTPSLLLRVLFCAVCGEPAYKFAGGGRKHPRYRCRSMGFPKHCGNGTVAMAEWDAFCEEQVLDLLGDAERLVKVWVAGSDSAVELAEVNAELVDLTSLIGSPAYRAGSPQREALDARIAALAARQEELEGLEARPSGWEWRETGQRFGDWWREQDTAAKNTWLRSMNVRLTFDVRGGLTRTIDFGDLQEYEQHLRLGSVVERLHTGMS

SEQ ID NO: 12855 - protein, 500 aa, synthetic construct
MRALVVIRLSRVTDATTSPERQLESCQQLCAQRGWDVVGVAEDLDVSGAVDPFDRKRRPNLARWLAFEEQPFDVIVAYRIDRLTRSIRHLQQLVHWAEDHKKLVVSATEAHFDTTTPFAAVVIALMGTVAQMELEAIKERNRSAAHYNIRAGKYRGSLPPWGYLPTRVDGEWRLVPDPVQRERILEVYHRVVDDHEPLHLVAHDLNRRGVLSPKDYFAQLQGREPQGRKWSATALKRSMISEAMLGYATLNGKTVRDGDGAPLVRAEPILTREQLEAIRAELVKTSRAKPAVSTPSLLLRVLFCAVCGEPAYKFAGGGRKHPRYRCRSMGFPKHCGNGTVAMAEWDAFCEEQVLDLLGDAERLEKVWVAGSDSAVELAEVNAELVDLTSLISSPAYRAGSPQREALDARIAALAARQEELEGLEARPSGWEWRETGQRFGDWWREQDTAAKNTWLRSMGVRLTFDVRGGLTRTIDFGDLQEYEQHLRLGSAVERLHTGMS

SEQ ID NO: 12856 - protein, 500 aa, synthetic construct
MRALVVIRLSRVTDATTSPERQLESCQQLCAQRGWDVVGVAEDLDVSGAADPFDRKRRPNLARWLAFEEQPFDVIVAYRVDRLTRSTRHLQQLVHWADDHKKLVVSATEAHFDTTTPFAAVVIALMGTVAQMELEAIKERSRSAAHFNIRAGKYRGSLPPWGYLPARVNGVWRLVPDPVQRERILEVYRRVVNNHEPLHLVAHDLNRRGVLSPRDYFAQLQGREPRGRKWSATALKRSMISEAMLGYATLNGKIVRDDDGAPLVRAEPILTREQLEALRAELVKTSRAKPAVSTPSLLLRVLFCAVCGEPAYKFAGGGRKHPRYRCRSMGFPKHCGNGTVAVAEWDTFCEEQVLDLLGDAERLEKVWVAGSDSAVELAEVKAELVDLTSLIGSPAYRAGSPQREALDARIAALAARQEELEGLEARPSGWEWRETGQRFGDWWREQDTAAKNAWLRSMNVRLTFDVRGGLTRTIDFGDLQEYEQHLRLGSVVERLHTGMS

SEQ ID NO: 12857 - protein, 500 aa, synthetic construct
MRALVVIRLSRVTDATTSPERQLESCQQLCAQRGWDVVGVAEDLDVSGAVDPFDRKRRPSLARWLAFEEQPFDVIVAYRVDRLARSIRHLQQLVHWAEDHKKLVVSATEAHFDTTTPFAAVAIALMGTVAQMELEAIKERSRSAAHFNIRAGKYRGSLPPWGYLPTRVDGEWRLAPDPVQRERILEVYHRVVDDHEPLHSVAHDLNRRGVLSPKDYFAQLQGREPRGRKWSATALKRSMTSEAMLGYATLNGKTVRDDDGAPLVRAEPILTREQQEALRAVLVTTSRAKPAVSTPSLLLRVLFCAVCGEPAYKFAGGGRKHPRYRCRSMGFPKHCGNGTVAMAEWDAFCEEQVLDLLGDAERLEKVWVAGSDSAVELAEVNAELVDLTSLISSPAYRAGSPQREALDARIAALAARQEELEGLEARPSGWEWRETGQRFGDWWREQDTAAKNTWLRSMNVRLTFDVRSGLTRTIDFGDLQEYEQHLRLGSVAERLRTGMS

SEQ ID NO: 12858 - protein, 500 aa, synthetic construct
MRALVVIRLSRVTDATTSPERQLESCQQLCAQRGWDVVGVAEDLDVSGAVDPFDRKRRPSLARWLAFEEQPFDVIVAYRVDRLARSIRHLQQLVHWAEDHKKLVVSATEAHFDTTTPFAAVVIALMGTVAQMELEAIKERSRSAAHFNIRAGKYRGSLPPWGYLPTRVDGEWRLAPDPVQRERILEVYHRVVDNHEPLHLVAHDLNRRGVLSPRDYFAQLQGREPQGRKWSATALKRSMISEAMLGYATLNGKTVRDDDGAPLARAEPILTREQLEAVRAELVKTSRAKPAVSTPSLLLRVLFCAVCGEPAYKFAGGGRKHPRYRCRSMGFPKHCGNGTVAMAEWDAFCEEQVLDLLGDAERLEKVWVAGSDSAVELAEVNAGLVDLTSLISSPAYRAGSPQREALDARIAALAARQEELEGLEARPSGWEWRETGQRFGDWWREQDTAAKNAWLRSMNVRLTFDVRGGLTRTIDFGDLQEYEQHLRLGSVVERLHTGMS

SEQ ID NO: 12859 - protein, 500 aa, synthetic construct
MRALVVIRLSRVTDATTSPERQLESCQQLCAQRGWDVAGVAEDLDVSGAVDPFDRKRRPNLARWLAFEEQPFDVIVAYRVDRLTRSTRHLQQLVHWAEDHKKLVVSATEAHFDTTTPFAAVVIALMGTVAQMELEAIKERSRSAAHFNIRAGKYRGSLPPWGYLPTRVDGEWRLVPDPVQRERILEVYHRVVNNHEPLHLVAHDLNRRGVLSPKDYFAQLQGREPQGRKWSATALKRSMISEAMLGYATLNGKTVRDDDGAPLVRAEPILTREQQEALCAELVKTSRAKPAVSTPSLLLRVLFCAVCGEPAYKFAGGGRKHPRYRCRSMGFPKHCGNGTVAMAEWDAFCEEQVLNLLGDAERLEKVWVAGSNSAVELAEVNAELVDLTSLIGSPAYRAGSPQREALDARIAALAARQEELGGLEARPPGWEWRETGQRFGDWWREQDTAAKNTWLRSMNVRLTFDVRGGLTRTIDFGDLQEYEQRLRLGSVVERSHTGMS

SEQ ID NO: 12860 - protein, 500 aa, synthetic construct
MRALVVIRLSRVTDATTSPERQLESCQQLCARRGWDVVGVAEDLDVSGAVDPFDRKRRPSLARWLAFEEQPFDVIVAYRVDRLARSIRHLQQLVHWAEDHKKLIVSATEAHFDTTTPFAAVVIALMGTVAQMELEAIKERSRSAAHFNIRAGKYRGSLPPWGYLPARVDGEWRLVPDPVQRERILEVYHRVVDNHEPLHLVAHDLNQRGVLSPKDYFAQLRGREPQGRKWSATALKRSMISEAMLGYATLNGKTVRDDDGAPLVRAEPILTREQQEALRAELVKTSRAKPAVSTPTLLLRVLFCAVCGEPAYKFSGGGRKHPRYRCRSMGFPKHCGNGTVAIAEWDAFCEEQVLDLLGDAERLEKVWVAGSDSAVEFAEVNAELVDLTSLIGSPAYRAGSPQREALDARIAALAARQEELEGLEARPSGWEWRETGQRFGDWWREQDIAAKNTWLRSMNIRLTFDVRDGLTRTIDFGDLQEYEQHLRLGSVVERLHTGVS

SEQ ID NO: 12861 - protein, 500 aa, synthetic construct
MRALVVIRLSRVTDATTSPERQLESCQQLCAQRGWDVVGVAEDLDVSGAVDPFDRKRRPNLARWLAFEEQPFDVIVAYRVDRLTRSTRHLQQLVHWAEDHKKLVVSATEAHFDTTTPFAAVVIALMGTVAQMELEAIKERSRSAAHFNIRAGKYRGSLPPWGYLPTRVNGEWRLVPDPVQRERILEVYHRVVVNREPLHLVAHDLNRRGVLSPKDYFAQLRGREPQGREWSATALKRSMLSEAMLGYATLNGKTVRDDDGAPLVRAEPILTREQQEALRAELVKTSRAEPTVFTPSLLLRVLFCAVCGEPAYKFAGGGRKHPRYRCRSMGFPKHCGNGTVAMAEWDAFCEEQVLNLLGDAERLEKVWVAGSDSAVELAEVNAELVDLTSLIGSPAYRVGSPQREVLDARIAALAARQEELEGLEARPSGWEWRETGQRFRDWWREQDTAAKNTWLRSMNVRLTYDVRGGLTRTIDFGDLQEYEQHLRLGSVAECLHTGMS

SEQ ID NO: 12862 - protein, 500 aa, synthetic construct
MRALVVIRLSRVTDATTSPERQLESCQQLCAQRGWDVVGVAVDLDVSGAVDPFDRKRRPNLARWLAFEEQPFDVIVAYRVDRLTRSTRHLQQLVHWAEDHKKLVVSATEAHFDTTTPFAAVVIALMGTVAQMELEAIKERSRSAAHFNIRAGKYRGSLPPWGYLPTRVDGEWRLVPDPVQRGRILEVYHRVVDNHEPLHLVAHDLNRRGVLSPKDYFAQLQGREPQGCKWSATALKRSMISEAMLGYATLNGETVRGDDGAPLVRAEPILTREQLEALRAELVKPSRAKPAVSTPSLLLRVLFCAVCGEPAYKFAGGGRKHPRYRCRSMGFPKHCGNGTVAMAEWDAFCEEQVLDLLGDAERLEKVWVAGSDSAVELAEVNAELVDLTSLIGSPTYRAGSPQREALDARIAALAARQEELEGLEARPSGWEWRETGQRFGDWWHEQDTAAKNTWLRSMNVRLTFDVRGGPTRTIDFGDLQEYEQHLRLGSVVERLHTGMS

SEQ ID NO: 12863 - protein, 500 aa, synthetic construct
MRTLVVIRLSRVTDATTSPERQLESCQQLCAQRGWDVVGVAEDLDVSGAVDPFDRKRRPNLARWLAFEEQPFDVIVAYRVDRLTRSIRHLQQLVHWAEDHKKLVVSATEAHFDTTTPFAAVVIALMGTVAQMELEAIKERNRSAAHFNIRAGKYRGSLPPWGYLPTRVDGEWRLAPDPVQRERILEVYHRVVDNHEPLHSVAHDLNRRGVLSPKDYFAQLQGREPQGRKWSATALKRSMISGAMLGYATLNGKTVRDDDGAPLVRAEPILTREQQEALRAELVKTSRAKPAVSTPSLLLRVLFCAVCGEPAYKFAGGGRKHPRYRCRSMGFPKHCGNGTVAMAEWDAFCEEQVLDLLGDAERLERVWVAGSDSAVELAEVNAELEDLTSLIGSPAYRAGSPQREALDARIAALAARQEELEGLEARPSGWEWRKTGQRFGDWWREQDTAAKNTWLRSMNVRLTFDVRGGLTRTIDFGDLQEYEQHLRLDSVVERLHTGVS

SEQ ID NO: 12864 - protein, 500 aa, synthetic construct
MRALVVIRLSRVTDATTSPERQLESCQQLCAQRGWDVVGVAEDLDVSGAVDPFDRKRRPNLARWLAFEEQPFDVIVAYRVDRLTRSIRHLQQLVHWAEDHKKLVVSATEAHFDTTTPFAAVVIALMGTVAQMELEAIRERSRSAAHFNIRAGKYRGSLPPWGYLPTRVDGEWRLVPDPVQRERILEVYHRVVDNHEPLHLVAHDLNRRGVLSPKDYFAQLRGREPQGHKWSATALKRSMTSEAMLGYATLNGKTVRDNDGAPLARAEPILTREQLEALRAELVKTSRAKPAVSTPSLLLRVLFCAVCGEPAYKFAGGGRKHPRYRCRSMGFPKHCGNGTVAMAEWDAFCEEQVLDLFGDAERLEKVWVAGSDSAVELAEVNAELVDLTSLIGSPAYRTGSPQREALDARIAALAARQEELEGLEARPSGWEWRETGQRFGDWWREQDTAAKNAWLRSMNVRLTFDVRGGLTRTIDFGDLQEYEQHLRLGSVVERLHTGMS

SEQ ID NO: 12865 - protein, 500 aa, synthetic construct
MRALVVIRLSRVTDATTSPERQLESCQQLCTQRGWDVVGVAEDLDVSGAVDPFDRKRRPNLARWLAFEVQPFDVIVAYRVDRLTRSTRHLQQLVHWAEDHKKLVVSATEAHFDTTTPFAAVVIALMGTVAQMELEAIRERNRSAAHFNIRAGKYRGSLPPWGYLPTRVDGEWRLAPDPVQRERILEVYHRVVDDHEPLHSVAHDLNRRGVLSPRDYFAQLQGREPRGRKWSATALKRSMISEAMLGYVTLNGKTVRDDDGAPLVRAEPILTREQLEALRAELVKTSRAEPAVSTPSLLLRVLFCAVCGEPAYKFAGGGRKHPRYRCRSMGFPEHCGNGTVAMAEWDAFCEEQVLGLLGDAERLEKVWVAGSDSAVELAEVNAELVDLTSLIGSPAYRAGSPQREALDARIAALAARQEELEGLEARPSGWEWRETGQRFGDWWREQDTAAKNTWLRSMNVHLTFDVRGGLTRTIDFGDLQEYEQHLRLGSVVERLHTGMS

SEQ ID NO: 12866 - protein, 500 aa, synthetic construct
MRALVVIRLSRVTDATTSPERQLESCQQLCAQRGWDVVGVAEDLDVSGAVDPFDRKRRPNLARWLAFKEQPFDVIVAYRVDRLTRSVRHLQQLVHWAEDHKKLVVSATEAHFDTTTPFAAVVIALMGTVAQMELEAIKERSRSAAHFNIRAGKYRGSLPPWGYLPTRVDGEWRLAPDPVQRERILEVYHRVVDNHEPLYLVAHDLNRRGVLSPKDYFAQLQGREPQGRKWSATALKRSMTSEAMLGYATLNGKTVRDDDGAPLVRAEPILAREQLEALRAELVKTSRAKPAVSTPSLLLRVLFCAVCGEPAYKFAGGGRKHPRYRCRSMGFPKHCGNGTVAMAEWDAFCEEQVLNLLGDTERLEKVWVAGSDSAVELAEVNAELVDLTSLIGSPAYRAGSPQREALDARIAALAARQEELEGLEARPSGWEWRETGQRFGDWWREQDTATKNTWLRSMNVRLTFDVRGGLTRTIDFGDLQEYEQHLRLGSAVERLHTGMS

SEQ ID NO: 12867 - protein, 500 aa, synthetic construct
MRALVVIRLSRVTDATTSPERQLESCQQLCAQRGWDVVGVAEDLDVSGAVDPFDRKRRPNLARWLAFEEQPFDVIVAYRVDRLTRSTRHLQRLVHWAEDHKKLVVSATEAHFDTTTPFAAVVIALMGTVAQMELEAIKERNRSAAHFNIRAGKYRGSLPPWGYLPTRVDGEWRLAPDPVQRERILEVYHRVVDNHEPLHLVAHDLNRRGVLSPKDYFAQLQGREPQGRKWSATALKRSMTSEAMLGYATLNGKTVRDDDGAPLVRAEPILTREQLEALRAELVRTSRAKPAVSTPSLLLRVLFCAVCGEPAYKFAGGGRKHPRYRCRSMGFPKHCGNGTVAMAEWDAFCEKQVLDLLGDAERLEKVWVAGSDSAVELAEANAELVDLTSLIGSPAYRAGSPQREALDARIAALAARQGELEGLEARPSGWEWRETGQRFGDWWREQDTAAKNTWLRSMNVRLTFDVRGGLTRTIDFGDLQEYEQHLRLGGVVERLHTGMS

SEQ ID NO: 12868 - protein, 500 aa, synthetic construct
MRALVVIRLSRVTDATTSPERQLESCQQLCAQRGWDVVGVAEDLDVSGAVDPFDRKRRPNLARWLAFEEQPFDVIVAYRVDRLTRSVRHLQQLVHWAEDHKKLVVSATEAHFDTTTPFAAVVIALMGTVAQMELEAIKERSRSAAHFNIRAGKYRGSLPPWGYLPARVDGEWRLVPDPVQRERILEVYHRVVDNHEPLHLVAHDLNRRGVLSPRDYFAQLQGREPQGRKWSATALKRSMISEAMLGYATLNGKTVRDDYGAPLVRAEPILTREQLEALRAELVKTSRAKPAVSTPSLLLRVLFCAVCGEPAYKFAGGGRKHPRYRCRSMGFPKHCGNGTVAMAEWDAFCEEQVLNLLGDAERLEKVWVAGSDSAVELAEVNAELVDLTSLIGSPAYRAGSPQREALDARIAALAARQEELEGLEARPSGWEWRGTGQRFGDWWREQGAAAKNTWLRSMNVRLTFDVRGGLTRAIDFGDLQEYEQHLRLGSVVERLHTGMS

SEQ ID NO: 12869 - protein, 500 aa, synthetic construct
MRALVVIRLSRVTDATTSPERQLESCQQLCAQRGWDVVGVAEDLDVSGAVDPFDRKRRPSLARWLAFEEQPFDAIVAYRVDRLARSIRHLQQLVHWAEDHKKLVVSATEAHFDTTTPFAAVVIALMGTVAQMELEAIKERSRSAAHFNIRAGKYRGSLPPWGYLPARVDGEWRLVPDPVQRERILEVYHRVVDDHEPLHSVAHDLNRRGVLSPRDYFAQLQGREPRGRKWSATALKRSMISEAMLGYVTLCGKTVRDDDGAPLVRAEPILTREQLEALRAELVKTSRAKPAVSTPSLLLRVLFCAVCGEPAYKFAGGGRKHPRYRCRSMGFPKHCGNGTVAMAEWDAFCEEQVLDLLGDAKRLEKVWVAGSDSAVELAEVNAELVDLMGLIGSPAYRAGSPQREALDARIAALAARQEELEGLEARPSGWEWRETGQRLEDWWREQDTAAKNTWLRSMNVRLTFDVRGGLTRTIDFGDLQEYEQHLRLGSVVKRSHTGTS

SEQ ID NO: 12870 - protein, 500 aa, synthetic construct
MRALVVIRLSRVTDATTSPERQLESCRQLCAQRGWDVVGVAEDLDVSGAVDPFDRKRRPNLARWLAFEEQPFDVIVAYRVDRLARSIRHLQQLVHWAEDHKKLVVSATEAHFDTTTPFAAVVIALMGTVAQMELEAIKERNRSAAHFNIRAGKYRGSLPPWGYLPTRVDGEWRLVPDPVQRERILEVYHRVVDNHEPLHLVAHDLNRRGVLSPKDYFAQLRGREPQGRKWSATALKRSMISEAMLGYATLNGKTVRDDDGAPLVRAEPILTREQQEALRAELVKTSRAKPAVSTPSLLLRVLFCAVCGEPAYKFAGGGRKHPRYRCRSMGFPKHCGNGTVAMAEWDAFCEEQVLDLLRDTERLEKVWVAGSDFAVELAEVNAELVDLTSLIGSPAYRAGSPQREALDARITALAARQEELEGLEARPSGWEWRGTGQRFGDWWCEQGTAAKNNWLRSMNVRLTFDVRGGLTRTIDFGDLQEYEQHLRLGSVVERLHTGMS

SEQ ID NO: 12871 - protein, 500 aa, synthetic construct
MRALVVIRLSRVTDATTSPERQLESCQQLCAQRGWDVVGVAEDLDVSGAVDPFDRKRRPNLARWLAFEEQPFDVIVAYRVDRLTRSVRHLQQLVHWAEDHKKLVVSATEAHFDTTTPFAAVVIALMGTMAQMELEAIRERSRSATHFNIRAGKYRGSLPPWGYLPTRVDGEWRLVPDPVQRERILEVYHRVVDNHEPLHLVAHDLNRRGVLSPKDYFAQLRGRKPQGRKWSATALKRSMISEAMLGYATLNGKTVRDDDGAPLVRAEPILTREQQEALRAELVKTSRAKPAVSTPSLLLRVLFCAVCGEPAYKFSGGGRKHPRYRCRSMGFPKHCGNGTVAIAEWDAFCEEQVLDLLGDAERLEKVWVAGSDSAVEFAEVNAELVDLTGLIGSPAYRAGSPQREALDARIAALATRQEELEGLEARPSGWEWRETGQRFGDWWREQDIAAKNTWLRSMNVRLTFDVRGGLTRTIDFGDLQEYEQHLRLGSVVERLYTGVS

SEQ ID NO: 12872 - protein, 500 aa, synthetic construct
MRALVVIRLSRVTDATTSPERQLESCQQLCAQRGWDVVGVTEDLDVSGAVDPFDRKRRPNLARWLAFEEQPFDVIVAYRVDRLARSIRHLQQLVHWAEDHKKLVVSATEAHFDTTTPFAAVVIALMGTVAQMELEAIKERSRSAAHFNIRAGKYRGSLPPWGYLPTRVDGEWRLAPDPVQRERILEVYHRVVDNHEPLHLVAHDLNRRGVLSPKDYFAQLRGREPQGRKWSATALKRSMISEAMLGYATLSGKTVRDDDGAPLVRAEPILTREQLEALRAELVKTSRAKPAVSTPSLLLRVLFCAVCGEPAYKFAGGGRKHPRYRCRSMGFPKHCGNGTVAMAEWDAFCEEQVLGLLGDAERLEKVWVAGSDSAVELAEVNAELVDLTSLIGSPAYRAGSPQREALDARIAALAARQEELEGLEARPSGWEWRGTGQRFGDWWREQDTAAKNTWLRSMNVRLTFDVRGGLTRTIDFGDLQEYEQHLRLGSVVERLLTGTS

SEQ ID NO: 12873 - protein, 500 aa, synthetic construct
MRALAVVRLSRVTDATTSPERQLESCQQLCAQRGWDVVGVAEDLDVSGAVDPFDRKRRPNLARWLAFEEQPFDAIVAYRVDRLTRSIRHLQQLVHWAEDHKKLVVSATEAHFDTTTPFAAVVIALMGTVAQMELEAIKERNRSAAHFNIRAGKYRGSLPPWGYLPTRVDGEWRLVPDPVQRERILEVYRRVVDNHEPLHLVAHDLNRRGVLSPKDYFAQLRGREPQGRKWSATALKRSMTSEAMLGYATLNGKTVRDDDGAPLVRAEPILTREQLEALRAELVKASRAKPAVSTPSLLLRVLFCAVCGEPAYKFAGGGRRHPRYRCRSMGFPKHCGNGTVAMTEWDAFCEEQVLDLLGDAERLEKVWVAGSDSAVKLAEVNAELVDLTGLIGSPAYRAGSPQREALDARIAALAARQEELEGLEARPSGWEWRGTGQRFGDWWREQDTAAKNTWLRSMNVRLTFDVRGGLTRTIDFGDLQEYEQHLRLGSVVERLHTGTS

SEQ ID NO: 12874 - protein, 500 aa, synthetic construct
MRALVVIRLSRVTDATTSPERQLESCRQLCAQRGWDVVGVAEDLDVSGAVEPFDRKRRPNLARWLAFEERPFDVIVAYRVDRLTRSIRHLQQLVHWAEDHKKLVVSATEAHFDTTTPFAAVVIALMGTVAQMELEAIKERNRSAAHFNIRAGKYRGSLPPWGYLPARVDGVWRLVPDPVQRERILEVYHRVVDEHEPLHLVAHDLNRRGVLSPKDYFAQLRGREPQGRRWSATALKRSMISGAMLGYATLNGKTARDDDGAPLVRAEPILTREQQEALRAELVRTSRAKPAVSTPSLLLRVLFCAVCGEPAYKFAGGGRKHPRYRCRSMGFPKHCGNGTVAMAEWDAFCEEQVLDLLGDAERLEKVWVAGSDSAVELAEVNAELVDLTSLIGSPAYRAGSPQREALDARIVALAARQEELEGLEARPSGWEWRGTGQRFRDWWREQDTAAKNTWLRSMNVRLTFNVRGGLTRTIDFGDLQEYEQHLRLGSVVERLHTGMS

SEQ ID NO: 12875 - protein, 500 aa, synthetic construct
MRALVVIRLSRVTDATTSPERQLESCQQLCAQRGWDVVGVAEDLDVSGAVDPFDRKRRPNLARWLAFEEQPFDVIVAYRVDRLTRSIRHLQQLVHWAEDHKKLVASATEAHFDTTTPFAAVTIALMGTVAQMELEAIKERSRSAAHFNIRAGKYRGSLPPWGYLPTRVDGEWRLAPDPVQRERILEVYHRVVDNHEPLHLVAHDLNRRGVLSPKDYFAQLRGREPQGRKWSATALKRSMTSEAMLGYATLNGKTVRDDDGAPLVRAEPILTREQLEALRAELVKTSRAKPAVSTPSLLLRVLFCAVCGEPAYKFAGGGRKHSRYRCRSMGFPKHCGNGTVAMAEWDAFCEEQVLDLLGDAERLEKVWVAGSDSAVELAEVNAELVDLTSLIGSPAYRAGSPQREALDARIAALAARQEELEGLEARPSGWEWRETGQRFGDWWREQDTAAKNTWLRSMNVRLTFDVRGGLTRSIDFGDLQVYEQHLRLGSVVERLHTGMS

SEQ ID NO: 12876 - protein, 500 aa, synthetic construct
MRALVVIRLSRVTDATTSPERQLESCQQLCAQRGWDVVGVAEDLDVSGAVDPFDRKRRPNLARWLAFEEQPFDVIVAYRVDRLARSIRHLQQLVHWAEDHKKLVVSATEAHFDTTTPFAAVVIALMGTVAQMELEAIKERNRSAAHFNIRAGKYRGSLPPWGYLPARVDGEWRLVPDPVQRERILEVYHRVVDKHEPLHLVAHDLNQRGVLSPKDYFAQLRGREPQGRKWSATALKRSMISGAMLGYATLNGKTVRDDDGAPLVRAEPILTREQLEALRAELVKTSRAKPAVSTPSLLLRVLFCAVCGEPAYKFAGGGRKHPRYRCRSMGFPKHCGNGTVAMAEWDAFCEEQVLNLLGGAERLEKVWVAGSDSAVELAEVNAELVDLTSLIGSPAYRAGSPQREALDARIAALAARQEELEGLEARPSGWEWRETGQRFGDWWREQDTAAKNTWLRSMNVRLTFDVRGGLTRTIDFGDLQEYEQHLRLGSVVECLHTGMS

SEQ ID NO: 12877 - protein, 500 aa, synthetic construct
MRAIVVIRLSRVTDATTSPERQLESCQQLCAQRGWDVVGVAEDLDVSGAVDPFDRKRRPNLARWLAFEEQPFDAIVAYRVDRLTRSIRHLQQLVHWAEDHKKLVVSATEAHFDTTTPFAAVVIALMGTVAQMELEAIKERSRSAAHFNIRAGKYRGSLPPWGYLPKRVDGEWRLVPDPVQRERILEVYHRVVDNHEPLHLVAHDLNRRGVLSPKDYFAQLQGREPQGRKWSATALKRSMISGAMLGYATLNGKTVRGDDGAPLVRAEPILTREQLEALRAELVKTSRAKPAVSTPSLLLRVLFCAVCGEPAYKFAGGGRKHPRYRCRSMGFPKHCGNGTVAMAEWDAFCEEQVLNLLGDAERLEKVWVAGSDSAVELAEVNAELVDLTSLIGSPAYRTGSPQREALDAHIAALAARQEELEGLEARPSGWEWRGTGQRFGDWWREQGTAAKNTWLRSMNVRLTFDVRGGLTRTIDFGDLQEYEQYLRLGSVIERLHTGMS

SEQ ID NO: 12878 - protein, 500 aa, synthetic construct
MRALVVIRLSRVTDATTSPERQLESCQRLCAQRGWGVVGVAEDLDVSGAVDPFDRKRRPNLARWLAFEEQPFDVIVAYRVDRLTRSVRHLQQLVHWAEDHKKLVVSATEAHFDTTTPFAAVVIALMGTVAQMELEAIKERNRSAAHFNIRAGKYRGSLPPWGYLPTRVDGEWRLVPDPVQRERILEVYRRVVVNHEPLHLVAHDLNRRGVLSPRDYFAQLQGREPQGRKWSATALKRSMISEAMLGYATLNGKIVRDDDGAPLVRAEPILTREQLEALRAELAKTSRAKPAVSTPSLLLRVLFCAVCGEPAYKFAGGGRKHPRYRCRSMGFPKHCGNGTVAMTEWDVFCEEQVLDLLGDAERLEKVWVAGSDSAVKLAEVNAELVDLTSLIGSPAYRAGSPQREALDARIAALVARQEELDGLEARPSGWEWRETGQRFGDWWREQDTAAKNTWLRSMNVRLTFDVRGGLTRTIDFGDLQEYEQHLRLGSVVERLHTGMS

SEQ ID NO: 12879 - protein, 500 aa, synthetic construct
MRALVVIRLSRVTDATTSPERQLESCQQLCAQRGWDVVGVAEDLDVSGAVDPFDRKRRPNLARWLAFEEQPFDVIVAYRVDRLARSIRHLQQLVHWAEDHKKLVVSATEAHFDTTTPFAAVVIALMGTVAQMELEAIKERNRSAAHFNIRAGKYRGSLPPWGYLPTRVDGEWRLAPDSVQRERILEVYHRVVDNHEPLHLVAHDLNRRGVLSPKDYFAQLQGREPQGRKWSATALKRSMISEAMLGHATLNGKTVRDDDGAPLVRAEPILTREQQEALRAELVKTSRAKPAVSTPSLLLRVLFCAVCGEPAYKFAGGGRRHPRYRCRSMGSPKHCGNGTVAMVEWDAFCEEQVLGLLGDAERLERVWVAGSDSAVELAEVNAELVDLTSLIGSPAYRAGSPQREALDARIAALAARQEKLEGLEARPSGWGWRETGQRFGDWWREQDTAAKNTWLRSMNVRLTFDVRGGLTRTIDFGDLQEYEQHLRSGSVVERLHTGVS

SEQ ID NO: 12880 - protein, 500 aa, synthetic construct
MRALVVIRLSRVTDATTSPERQLESCQQLCAQRGWDVVGVAEDLDVSGAVDPFDRKRRPNLARWLAFEEQPFDVIVAYRVDRLTRSVRHLQQLVHWAEDHKKLVVSATEAHFDTTTPFAAVVIALMGTVAQMELEAIKERSRSAAHFNIRAGKYRGSLPPWGYLPTRVDGEWRLAPDPVQRERILEVYHRVVGNHEPLHLVAHDLNRRGVLSPKDYFAQLQGREPQGRKWSATALKRSMISEAMLGYATLNGETVRDDDGAPLVRAEPILTREQLEALRAELVKTSRAKPAVSTPSLLLRVLFCAVCGEPAYKFAGGGRKHPRYRCRSMGFPKHCGNGTVAMAEWNAFCEEQVLGLLGDAERLEKVWVAGSDSAVELAEVNAELVDLTSLIGSPAYRAGSPQREALDARIAALAARQEELEGLEARPSGWEWRETGQRFGDWWREQDTAAKNTWLRSMNVRLTFDVRGGLTRTIDFGDLQEYEQRLRSGSVVERLHTGMS

SEQ ID NO: 12881 - protein, 500 aa, synthetic construct
MRALVVIRLSRVTDATTSPERQLESCQQLCAQRGWDVVGVAEDLDVSGAVDPFDRKRRPNLARWLAFEEQPFDVIVAYRVDRLTRSTRHLQQLVHWAEDHKKLVVSATEAHFDTTTPFAAVVIALMGTVAQMELEAIKERSRSAAHFNIRAGKYRGSLPPWGYLPARVDGEWRLVPDPVQRERILEVYHRVVDNHEPLHLVAHDLNRRGVLSPKDYFAQLRGREPQGREWSATALKRSMISEAMLGYATLNGKIVRDDDGVPLVRAEPILTREQLEALRAELVKTSRAKPAVSTPSLLLRVLFCAVCGEPAYKFAGGGRKHPRYRCRSMGFPEHCGNGTVAMAEWDAFCEEQVLDLLGDAERLEKVWVAGSDSAAELAEVNAELVDLTSLIGSPSYRAGSPQREALDARIAALAARQEELEGLEARPSGWEWRETGQRFGDWWREQDTAAKNTWLRSMNVRLTFDVRGGLTRTIDFGDLQEYEQHLRLGSVVERLRTGMS

SEQ ID NO: 12882 - protein, 500 aa, synthetic construct
MRVLVVIRLSRVTDATTSPERQLESCQQLCAQRGWDVVGVAEDLDVSGAVDPFDRKRRPNLARWLAFEEQPFDVIAAYRVDRLTRSVRHLQQLVHWAENHKKLVVSATEAHFDTTTPFAAVVIALMGTVAQMELEAIKERSRSAAHFNIRAGKYRGSLPPWGYLPTRVDGEWRLAPDPVQRERILEVYHRVVDNHEPLHLVAHDLNRRGVLSPKDYFAQLQGREPQGRKWSATALKRSMISEAMLGYATLNGKTVRDDDGAPLVRAEPILTREQQEALRAELVKTSRAKPAVSTPSLLLRVLFCAVCGEPAYKFSGGGRKHPRYRCRSMGFPKHCGNGTVAMAEWDAFCEEQVLDLLGDAERLEKVWVAGSDSAVELAEVSAELVDLTSLIGSPAYRAGSPQREALDARIAALAARQEKLEGLGARPSGWEWRETGQRFGDWWREQDTAAKNTWLRSMNVRLTFDVRGGLTRMIDFGDLQEYEQHLRLGSVVERLYTGMS

SEQ ID NO: 12883 - protein, 500 aa, synthetic construct
MRALVVIRLSRVTDATTSPERQLESCQQLCAQRGWDVAGVAEDLDVSGAVDPFDRKRRPNLARWLAFEERPFDVIVAYRVDRLTRPTRHLQQLVHWAEDHKKLVVSATEAHFDTTTPFAAVVIALMGTVAQMELEAIKERSRSAAHLNIRAGKYRGSLPPWGYLPARVDGEWRLVPDPVQRERILEVYHRVVDNHEPLHLVARDLNRRGVLSPKDYFAQLRGREPQGREWSATALKRSMTSEAMLGYATLSGKIVRDDDGAPLVRAEPILTREQLEALRAELVKTSRAKPAVSTPSPLLRVLFCAVCGEPAYKFAGGGRKHPRYRCRSMGFPKHCGDGTVAMAEWDAFCEEQVLGLLGGAERLEKVWVAGSDSAVELAEVNAELVDLTSLIGSPAYRAGSPQREALDARIAALAARQEELEGLEARPSGWEWRETGQRFGDWWREQDTAAKNTWLRSMNVRLTFDVRGGLTRSIDFGDLQVYEQHLRLGSVVERLHTGMS

SEQ ID NO: 12884 - protein, 500 aa, synthetic construct
MRALVVIRLSRVTDATTSPERQLESCQQLCAQRGWDVVGVAEDLDVSGAVDPFDRKRRPNLARWLAFEEQPFDVIVAYRVDRLTRSTRHLQQLVRWAEDHKKLVVSATEAHFDTTTPFAAVVIALMGTVAQMELEAIKERNRSAAHFNIRAGKYRGSLPPWGYLPTRVDGEWRLVPDPVQRERILEVYHRVVDYHEPLHLVAHDLNRRGVLSPKDYFAQLRGREPQGRKWSATALKRSMTSEAMLGYATLNGKTVRDDDGAPLVRAEPILTREQLEALRAELVKTSRAKPAVPTPSLLLRVLFCAVCGEPAYKFAGGGRKHPRYRCRSMGFPKHCGNGTVAMAEWDAFCEEQVLNLLGDAERLEKVWVAGSDSAVELAEVNAELVDLTSLIGSPAYRVGSPQREALDARIAALAARQEELEGLEARPSGWEWRETGQRFRDWWREQDTAAKNTWLRSMNVRLTYDVRGGLTRTIDFGDLQEYEQHLRLGSVVERLHTGMS

SEQ ID NO: 12885 - protein, 500 aa, synthetic construct
MRALVVIRLSRVTDATTSPERQLESCQQLCAQRGWDVVGVAEDLDVSGAVDPFDRKRRPNLARWLAFEEQPFDVIVAYRVDRLTRSVRHLQQLVHWAEDHKKLVVSATEAHFDTTTPFAAVVIALMGTVAQMELEAIKERSRSAAHFNIRAGKYRGSLPPWGYLPTRVDGEWRLAPDPVQRERILEVYHRVVDNHEPLHLVAHDLNRRGVLSPKDYFAQLQGREPQGRKWSATALKRSMVSVAMLGYATLNGKTVRDDDGAPLVRAEPILTREQLEALRAELVKTSRAEPAVSTPSLLLRVLFCAVCGEPAYKFAGGGRKHPRYRCRSMGFPKHCGNGTVAMAEWDAFCEEQVLDLLGDAERLEKVWVAGSDSAVELAEVNAELVDLTSLIGSPAYRTGSPQREALDARIAALAARQEELEGLEARPSGWEWRGTGQRFGDWWREQGTAAKNTWLRSMNVRLTFDVRGGLTRTIDFGDLQEYEQHLRLGSEVERLHTGMS

SEQ ID NO: 12886 - protein, 500 aa, synthetic construct
MRALVVIRLSRVTDATTSPERQLESCQQLCAQRGWDVVGVAEDLDVSGAVDPFDRRRRPNLARWLASEEQPFDVIVAYRVDRLTRSVRHLQQLVHWAEDHKKLVVSATEAHFDTTTPFAAVVIALMGTVAQMELEAIRERSRSAAHFNIRAGKYRGSLPPWGYLPTRVDGEWRLVPDPVQRERILEVYHRVVDNHEPLHLVAHDLNRRGVLSPKDYFAQLRGREPQGRKWSATALKRSMISEAMLGYATLNGKTVRDDDGAPLVRAEPILTREQQEALRAELVKTSRAKPAVSTPSLLLRVLFCAVCGEPAYKFAGGGRKHPRYRCRSMGFPKHCGNGTVAMAEWDAFCEEQVLDLLGDAERLEKVWVAGSDSAVELAEVNAELVDLTSLIGSPAYRAGSPQRVALDARIAALAARQEELEGLEARPSGWEWRETGQRFGDWWREQDTAAKNTWLRTMNVRLTFDVRGGLTRTIDFGDLQEYEQHSRLGSVVERLHTGMS

SEQ ID NO: 12887 - protein, 500 aa, synthetic construct
MRALVVIRLSRVTDATTSPERQLESCQQLCAQRGWDVVGVAEDLDVSGAVDPFDRKRRPNLARWLAFEEQPFDVIVAYRVDRLTRSIRHLQQLVHWAEDHKKLVVSATEAHFDTTTPFAAVVIALMGTVAQMELEAIKERSRSAAHFNIRAGKYRGSLPPWGYLPARVDGEWRLVPDPVQRERILEVYHRVVDNHEPLHLVAHDLNRRGVLSPKDYFAQLRGREPQGRKWSATALKRSMTSEAMLGYATLNGKTVRDDDGAPLVRAEPILTREQLEALRAVLVKTSRAKPAVSTPSLLLRVLFCAVCGEPAYKFAGGGRKHPRYRCRSMGFPKHCGNGTVAMAEWDAFCEEQVLNLLGDAERLEKVWVAGSDSAVELAEVNAELVDLTSLIGSPAYRAGSPQREALDARIAALAARQEELEGLEARPSGWEWRETGQRFGDWWLEQDTAAKNTWLRSMNVRLTFDVRGGLTRSIDFGDLQEYEQHLRLGSVVERLHTGMS

SEQ ID NO: 12888 - protein, 500 aa, synthetic construct
MRAIVVIRLSRVTDATTSPERQLESCQQLCAQRGWDVVGVAEDLDVSGAVDPFDRKRRPNLARWLAFEEQPFDAIVAYRVDRLTRSIRHLQQLVHWAEDHKKLVVSATEAHFDTTTPFAAVVIALMGTVAQMELEAIRERNRSAAHFNIRAGKYRGSLPPWGYLPTRVDGEWRLVPDPVQRERILEVYHRVVDNHEPLHLVAHDLNRRGVLSPKDYFAQLRGREPQGRKWSATALKRSMTSEAMLGYATLNGKTVRNDDGAPLVRAEPILTREQLEALRAELVKTSRAKPAVSTPSLLLRVLFCAVCGEPAYKFAGGGRKHPRYRCRSMGFPKHCGNGTVAMAEWDAFCEEQVLNLLGDAERLEKVWVAGSDSAVELAEVNAELVDLTSLICSPAYRAGSPQREALDARIAALAARQEELEGLEARPSGWEWRETGQRFGDWWREQDTAAKNTWLRSMNVRLTFDVRGGLTRTIDFRDLQEYEQHLRSGSVVERLRTGMS

SEQ ID NO: 12889 - protein, 500 aa, synthetic construct
MRALVVIRLSRVTDATTSPERQLESCQQLCAQRGWDVVGVAEDLDVSGAVDPFDRKRRPNLARWLAFEEQPFDVIVAYRVDRLARSIRHLQQLVHWAEDHKKLVVSATEAHFDTTTPFAAVVIALMGTVAQMELEAIKERSRSAAHFNIRAGKYRGSLPPWGYLPTRVDGEWRLVPDPVQRERILEVYHRVVDNHEPLHLVAHDLNRRSVLSPKDYFAQLRGREPQGRKWSATALKRSMISEAMLGYATLNGKTVRDDDGAPLVRAEPILTREQLEALRAELVKTSRAKPAVSTPSLLLRVLFCAVCGEPAYKFFGGGRKHPRYRCRSMGFPKHCGNGTVAMAEWDAFCEEQVLDLLGDAERLEKVWVAGSDSAVELAEVNAELVDLTSLIGSPAYRAGSPQREALDARIAALAARQGELEGLEARPSGWEWRETGQRFRDWWREQDTAAKNTWLRSMNVRLTFDVRGGLTRTIDFGDLQEYEQHLRLGSVVERLHTGMS

SEQ ID NO: 12890 - protein, 500 aa, synthetic construct
MRALVVIRLSRVTDATTSPERQLESCQQLCAQRGWDVVGVAEDLDVSGAVDPFDRKRRPNLARWLAFEEQPFDAIVAYRVDRLARSVRHLQQLVRWAEDHKKLVVSATEAHFDTTTPFAAVVIALMGTVAQMELEAIKERNRSAAHFNIRAGKYRGSLPPWGYLPTRVGGEWRLVPDPVQRERILEVYHRVVDNHEPLHLVAHDLNRRGVLSPKDYFAQLRGREPQGRKWSATALKRSMISEAMLGYATLNGKTVRDDDGAPLVRAEPILTREQQEALRAELVKTSRAEPAVSTPSLLLRVLFCAVCGEPAYKFAGGGRKHPRYRCRSMGFPKHCGNGTVAMAEWDAFCEEQVLDLLGDAERLEKVWVAGSDSAVELAEVNAELVDLTSLIGSPAYRAGSPQREALDARIAALAARQEELEGLGARPSGWEWRETGQRFGDWWREQDTAAKNTWLRSMNVRLTFDVRGGLTRTIDFGDLQEYEQHLRLGSVVERLHTGMS

SEQ ID NO: 12891 - protein, 500 aa, synthetic construct
MRALVVIRLSRVTDATTSPERQLESCQQLCAQRGWEVVGVAEDLDVSGAVDPFDRKRRPNLARWLAFEEQPFDVIVAYRVDRLARSIRHLQQLVHWAEDHKKLVVSATEAHFDTTTPFAAVVIALMGTVAQMELEAIKERNRSAAHFNIRAGKYRGSLPPWGYLPTRVDGEWRLVPDPVQRERILEVYHRVVDKHEPLHLVAHDLNRRGVLSPKDYFAQLRGREPQGRKWSATALKRSMISEAMLGYATLNGKTVRDDDGAPLVRAEPILTREQLEALRAELVKTSRAKPAVSTPSLLLRVLFCAVCGEPAYKFAGGGRKHPRYRCRSMGFPKHCGNGTVAMAEWDAFCEEQVLDLLGGAERLEKVWVAGSDSAVELAEVNAELVDLTSLIGSPAYRAGSPQREALDARIAALAARQEELEGLEARPSGWAWRGTGQRFGDWWREQDTAAKNTWLRSMNVRLTFDVRGGLTRTIDFGDLQEYEQHLRLGSVVERLHTGMS

SEQ ID NO: 12892 - protein, 500 aa, synthetic construct
MRALVVIRLSRVTDATTSPERQLESCQQLCAQRGWDVVGVAEDLDVSGAVDPFDRKRRPNLARWLAFEEHPFDVIVAYRVDRLTRSIRHLQQLVHWAEDHKKLVVSATEAHFDTTTPFAAVVIALMGTVAQVELEAIKERNRSAAHFNIRAGKYRGSLPPWGYLPTRVDGEWRLAPDPVQRERILEVYHRVVDNHEPLHLVAHDLNRRGVLSPRDYFAQLRGREPQGRKWSATALKRSMTSEAMLGYATLNGKTVRGDDGAPLVRAEPILTREQLEALRAELVKTSRAKPAVSTPSLLLRVLFCAVCGEPAYKFAGGGRKHPRYRCRSMGFPKHCGNGTVAMAEWDAFCEEQVLDLLGDAERLEKVWVAGSDSAVELAEVNAGLVDLTSLIGSPAYRAGSPQREALDARIAALAARQEELEGLEARPSGWEWRETGQRFGDWWREQDTAAKNTWLRSMNVRLTFDVRGGLTRTIDFGDLQEYEQHLRLGSVVERLHTGMP

SEQ ID NO: 12893 - protein, 500 aa, synthetic construct
MRALVVIRLSRVTDATTSPERQLESCRQLCAQRGWDVVGVAEDLDVSGAVDPFDRKRRPNLARWLAFEEQPFDVIVAYRVDRLARSIRYLQQLVHWAEDHKKLVVSATEAHFDTTTPFAAVVIALMGTVAQMELEAIKERSRSAAHFNIRAGKYRGSLPPWGYLPTRVDGEWRLVPDPVQRERILEVYHRVVDNHEPLHLVAHDLNRRGVLSPKDYFAQLRGREPQGRKWSATALKRSMISEAMLGYATLNGKTVRDDDGAPLVRAEPILTREQLEALRAVLVKTPRAKPAVSTPSLLLRVLFCAVCGEPAYKFAGGGRKHPRYRCRSMGFPKHCGNGTVAMAEWDAFCEEQVLNLLGDAERLEKVWVAGSDSAVELAEVNKELVDLTSLIGSPAYRAGSPQREALDARIAALAARQEELEGLEARPSGWEWRGSGQRFGDWWRELDTAAKNTWLRSMNVRLTFDVRDGLTRTIDFGDLHEYEQHLRLGSVVERSHTGMS

SEQ ID NO: 12894 - protein, 500 aa, synthetic construct
MRALVVIRLSRVTDATTSPERQLESCQQLCAQRGWDVVGVAEDLDVSGAVDPFDRKRRPNLARWLAFEEQPFDVIMAYRVDRLTRSTRHLQRLVHWAEDHKKLVVSATEAHFDTTTPFAAVVIALMGTVAQMELEAIKERNRSAAHFNIRTGKYRGSLPPWGYLPARVDGEWRLVPDPVQRERILEVYHRVVDDHEPLHLVAHDLNRRGVLSPKDYFAQLQGREPQGRKWSATALKRSMISGAMLGYATLNSKTVRDDDGAPLVRAEPILTREQQEALRAELVKTSRAKPAVSTPSLLLRVLFCAVCGEPAYKFAGGGRKHPRYRCRSMGFPKHCGNGTVAMAEWDAFCEEQVLGLLGDAERLEKVWVAGSDSAVELAEVNAELVDLTSLISSPAYRVGSPQREALDARIAALAARQEELEGLEARPSGWEWRETGQRFGDWWREQDTAAKNTWLRSMNVRLTFDVRGGLSRTIDFGDLQEYEQHLRLGSVVERLHTGMS

SEQ ID NO: 12895 - protein, 500 aa, synthetic construct
MRALVVIRLSRVTDATTSPERQLESCQQLCAQRGWDVVGVAEDLDVSGAVDPFDRKRRPNLARWLAFEEQPFDVIVAYRVDRLTRSTRHLQQLVHWAEDHKKLVVSATEAHFDTTTPFAAVVIALMGTVAQMELEAIKERSRSAAHFNIRAGKYRGSLPPWGYLPARVDGEWRLVPDPVQRERILEVYHRVVDNHEPLHLVAHDLNRRGVLSPKDYFAQLQGREPQGRKWSATALKRSMTSEAMLGYATLNGKTVRDEDGAPLVRAEPILTREQLEALRAELVKTSRAKPAVSTPSLLLRVLFCAVCGEPAYKFAGGGRKHPRYRCRSMGFPKHCGNGTVAMAEWDAFCEEQVLNLLGDAERLEKVWVAGSDSAVELAEVNAELVDLTSLIGSPAYRADSPQREALDARIAALAARQEELGGLEARPSGWEWRETGQRFGDWWREQDTAAKNSWLRSMNVRLTFDVRGGLTRTIDFGDLQEYEQHLRLGSVVERLHTGMS

SEQ ID NO: 12896 - protein, 500 aa, synthetic construct
MRALVVIRLSRVTDATTSPERQLESCQQLCAQRGWDVVGVAEDLDVSGAVDPFDRKRRPNLARWLAFEEQPFDVIVAYRVDRLTRSTRHLQQLVHWAEDHKKLVVSATEAHFDTTTPFAAVVIALMGTVAQMELEAIKERNRSAAHFNIRAGKYRGSLPPWGYLPTRVDGEWRLVPDPVQRERILEVYHRVVDNHEPLHLVAHDLNRRGVLSPKDYFAQLQGREPQGRKWSATALKRSMTSEAMLGYATLNGKTVRDDDGAPLVRAEPILTREQLEAVRVELVKTSRAKPAVSTPSLLLRVLFCAVCGEPAYKFAGGGRKHPRYRCRSMGFPKHCGNGTVAMAEWDAFCEEQMLDLLGDAERLEKVWVAGSDSAVELAEVSAELVDLTSLIGSPAYRAGSPQREALDARIAALAARQEELEGLEARPSGWEWRETGQRFGDWWREQDTAAKNTWLRSMNVRLTFDVRGGLTRTIDFGDLREYEQHLRSGGVVERLHTGMS

SEQ ID NO: 12897 - protein, 500 aa, synthetic construct
MRALVVIRLSRVTDATTSPERQLESCQQLCAQRGWDVVGVAEDLDVSGAVDPFDRKRRPNLARWLAFEEQPFDVIVAYRVDRLARSIRHLQQLVHWAEDHKKLVVSATEAHFDTTTPFAAVVIALMGTVAQMELEAIKERSRSAAHFNIRAGKYRGSLPPWGYLPARVDGEWRLVPDPVQRERILEVYHRVVDNHEPLHLVAHDLNRRGVLSPKDYFAQLQGREPQGRKWSATALKRSMISVAMLGYATLNGKTVRDDDGAPLVRAEPILTHEQLEALRAELVKTSRAKPAVSTPSLLLRVLFCAVCGEPAYKFAGGGRKHPRYRCRSMGFPKHCGNGTVAMAEWDAFCEEQVLDLLGDAERLEKVWVAGSDSAVELAEVNAELVDLTSLIGSPAYRAGSPQREALDARIAALAARQEELEGLEARPSGWEWRETGQHFGDWWREQDTAAKNTWLRSMNVRLTFDVHGGLTRTIDFGDLLEYEQHLRLGSMVERLHTGMS

SEQ ID NO: 12898 - protein, 500 aa, synthetic construct
MRALVVIRLSRVTDATTSPERQLESCQQLCAQRGWDVVGVAEDLDVSGAVDPFDRKRRPNLARWLAFEEQPFDVIVAYRVDRLTRSIRHLQQLVHWAEDHKRLVVSATEAHFDMTTPFAAVVIALMGTVAQMELEAIKERSRSAAHFNIRAGKYRGSLPPWGYLPTRVDGEWRLVPDPVQRERILEVYHRVVDNHEPLHLVAHDLNRRGVLSPKDYFAQLRGREPQGRKWSATALKRSMISEAMLGYATLNGKTVRDDDGAPLVRAEPILTREQLEALRVELVKTSRAKPAVSTPSLLLRVLFCAVCGEPAYKFAGGGRKHPRYRCRSMGFPKHCGNGTVAMAEWDAFCEKQVLDLLGDAERPEKVWVAGSDSAVELAEVNAELVDLTSLISSPAYRAGSPQREALDARIAALAARQEELEGLEARPSGWEWRETGQRFGDWWREQDTAAKNTWLRSMNVRLTFDARGGLTRTIDFGDLQEYEQHLRLGGVVERLHTGMS

SEQ ID NO: 12899 - protein, 500 aa, synthetic construct; identical to SEQ ID NO: 12513

SEQ ID NO: 12900 - protein, 500 aa, synthetic construct
MRALVVIRLSRVTDTTTSPERQLESCQQLCAQRGWDVVGVAEDLDVSGAVDPFDCKRRPNLARWLAFEEQPFDVIVAYRVDRLTRSIRHLQQLVHWAEDHKKLVVSATEAHFDTTTPFAAVVIALMGTVAQMELEAIKERNRSAAHFNIRAGKYRGSLPPWGYLPARVDGEWRLVPDPVQRERILEVYHRVVDNHEPLHLVAHDLNRRGVLSPRDYFAQLRGREPQGRKWSATALKRSMISEAMLGYATLNGKTVRDDDGAPLVRAEPILTRKQREALRAELVKTSRAKPAVSTPSLLLRVLFCAVCGEPAYKFAGGGRKHPRYRCRSMGFPKHCGNGTVAMAEWDAFCEEQVLGLLGDAERLEKVWVAGSDSAVELAEVNAELVDLTSLIGSPAYRAGSPQREALDARIAALAARQEELEGLEARPSGWEWRETGQRFGDWWREQDTAGKNTWLRSMNVRLTFDVRGGLTRTIDFGDLQEYEQHLRLGSVVERLHTGMS

SEQ ID NO: 12901 - protein, 500 aa, synthetic construct
MRALVVIRLSRVTDATTSPERQLESCQQLCAQRDWDVVGVAEDLDVSGAVDPFDRKRRPNLSRWLAFEEQPFDAIVAYRVDRLTRSIRHLQQLVHWAEDHKKLVVSATEAHFDTTTPFAAVVIALMGTVAQMELEAIKERNRSAAHFNIRAGKYRGSLPPWGYLPTRADGEWRLVPDPVQRERILEVYHRVVDNHEPLHLVAHDLNRRGVLSPKDYFAQLQGREPQGRKWSATALKRSMISEAMLGYATLNGKIVRDDDGAPLVRAEPILTREQQEALRAELVKTSRAKPAVPTPSLLLRVLFCAVCGEPAYKFAGGGRKHPRYRCRSMGFPKHCGNGTVAMAEWDAFCEEQVLDLLGDAERLEKVWVAGSDSAVELAEVNAELIDLTSLIGSPAYRAGSPQREALDARIAALAARQEELEGLEARPSGWEWRETGQRFGDWWREQDTAAKNTWLRSMNVRLTFDVRGGLTRTIDFGDLQEYEQHLRLGSVVVRLHTGMP

SEQ ID NO: 12902 - protein, 500 aa, synthetic construct
MRALVVTRLSRVTDATTSPERQLESCQQLCAQRGWDVVGVAEDLDVSGAVDPFDRKRRPNLARWLAFEEQPFDVIVAYRVDRLTRSTRHLQQLVRWAEDHKKLVVSATEAHFDTTTPFAAVVIALMGTVAQMELEAIKERNRSAAHFNIRAGKYRGSLPPWGYLPARVDGEWRLVPDPVQRERILEVYHRVVDNHEPLHLVARDLNRRGVLSPKDYFAQLRGREPQGRKWSATALKRSMISEAMLGYATLSGKTVRDDDGAPLVRAEPILTREQLEALRAELVKTSRAKPAVSTPSLLLRVLFCAVCGEPAYKFSGGGRKHPRYRCRSMGFPKHCGNGTVAMAEWDAFCEEQVLDLLGDAERLEKVWVAGSDSAVELAEVNAELVDLTSLIGSPAYRAGSPQREALDARIAALAARQEELEGLEARPSGWEWRETGQRFGDWWREQDTAAKNTWLRSMNVRLTFDVRGELTRTIDFGDLQEYEQHLRLGSVVERLHTGMS

SEQ ID NO: 12903 - protein, 500 aa, synthetic construct
MRALVVIRLSRVTDATTSPERQLESCQQLCAQRGWDVVGVAEDLDVSGAVDPFDRKRRPNLARWLAFEEQPFDVIVAYRVDRLARSIRHLQQLVHWAEDHKKLVVSATEAHFDTTTPFAAVVIALMGTVAQMELEAIKERSRSAAHFNIRAGKYRGSLPPWGYLPARVDGEWRLVPDPVQRERILEVYHRVVDNHEPLHLVAHDLNRRGVLSPKDYFAQLQGREPQGRKWSATALKRSMTSKAMLGYATLNGKTVRDDDGAPLVRAEPILTREQLEALRAELVKTSRAKPAVSTPSLLLRVLFCAVCGEPAYKFAGGGRKHPRYRCRSMGFPKHCGNGTVAMAEWDAFCEEQVLNLLGDAERLEKVWVAGSDSAVELAEVNAELVDLTSLIGSPAYRAGSPQREALDARIAALAARQEELEGLEARPSGWEWRETGQRFGDWWREQDTAAKNTWLRSMNVRLTFDVRGGLTRTIDFGDLREYEQHLRLGSVVERLHTGMS

SEQ ID NO: 12904 - protein, 500 aa, synthetic construct
MRALVVIRLSRVTDATTSPERQLESCQQLCAQRDWDVVGVAEDLDVSGAVDPFDRKRRPNLARWLAFEEQPFDVIVAYRVDRLTRSIRHLQQLVHWAEDHKKLVVSATEAHFDTTTPFAAVVIALMGTVAQMELEAIKERSRSAAHFNIRAGKYRGSLPPWGYLPARVDGEWRLVPDPVQRERILEVYHRVVDNHEPLHLVAHDLNRRGVLSPKDYFAQLQGREPQGRKWSATALKRSMISGAMLGYATLSGKTVRDDDGAPLVRAEPILTREQQEALRAELVKTSRAKPAVSTPSLLLRVLFCAVCGEPAYKFAGGGRKHPRYRCRSMGFPKHCGNGTVAMAEWDAFCEEQVLNLLGDAERLERVWVAGSDSAAELAEVNAELVDLTSLIGSPAYRAGSPQREALDARIAALAARQEELEGLEARPSGWEWRGTGQRFGDWWREQDTAAKNAWLRSMNVRLTFDVRGGLTRTIDFGDLQGYEQRLRLGSAVERLHTGMP

SEQ ID NO: 12905 - protein, 500 aa, synthetic construct
MRALVVIRLSRVTDATTSPERQLESCQQLCAQRGWDVVGVAEDLDVSGAVDPFDRKRRPNLARWLAFEEQPFDVIVAYRVDRLTRSTRHLQQLVHWAEDHKKLVASATEAHFDTTTPFAAVVIALMGTVAQMELEAIKERNRSAAHFNIRAGKYRGSLPPWGYLPSRVDGEWRLVPDPVQRERILEVYHRVVDNHEPLHLVAHDLNRRGVLSPRDYFAQLRGREPRGRKWSATALKRSMISEAMLGYATLNGKTVRDDDGAPLVRAEPILTREQLEALRVELVKTSRAKPAVSTPSLLLRVLFCAVCGEPAYKFAGGGRKHPRYRCRSMGFPKHCGNGTVAMAEWDAFCEEQVLDLLGDAERLEKVWVAGSDSAVELAEVNAELVDLTSLIGSPAYRAGSPQREALDARIAALAARQEELEGLEARPSGWEWRETGQRFRDWWREQDTAAKNTWLRSMNVRLTFDVRGGLTRTIDFGDLQEYEQHLRLGGVVERLHTGMS

SEQ ID NO: 12906 - protein, 500 aa, synthetic construct
MRALVVIRLSRVTDATTSPERQLESCQQLCAQRGWDVVGVAEDLDVSGAVDPFDCKRRPNLARWLAFEEQPFDVIVAYRVDRLARSIRHLQQLVHWAEDHKKLVVSATEAHFDTTTPFAAVVIALMGTVAQMELEAIKERCRSAAHFNIRAGKYRGSLPPWGYLPTRVDGEWRLAPDPVQRERILEVYHRVVDNHEPLHSVAHDLNRRGVLSPKDYFAQLRGREPQGRKWSATALKRSMISEAMLGYATLNGETVRGDDGAPLVRAEPILTREQLEALRAELVKTSRAKPAVSTPSLLLHVLFCAVCGEPAHKFAGGGRKHPRYRCRSMGFPKHCGNGTVAMAEWDTFCEEQVLDLLGDAERLEKVWVAGSDSAVELAEVNAELVDLTSLIGSPAYRAGSPQREALDARIAALAARQEELEGLEARPSGWEWRGTGQRFGDWWREQDTAAKNTWLRSMNIRLTFDVRGGLTRAIDFGDLQEYEQHLRLGGVVERLHTGMS

SEQ ID NO: 12907 - protein, 500 aa, synthetic construct
MRALVVIRLSRVTEATTSPERQLESCQQLCAQRGWDVVGVAEDLDVSGAVDPFDRKRRPNLARWLAFEEQPFDVIVAYRVDRLARSIRHLQQLVHWAEDHKKLVVSATEAHFDTTTPFAAVVIALMGTVAQMELEAIKERNRSAAHFNIRAGKYRGSLPPWGYLPTRVDGEWRLVPDPVQRERILEVYHRVVNNHEPLHLVAHDLNRRGVLSPKDYFAQLRGREPQGRKWSTTALKRSMTSEAMLGYATLNGKTVRDDGGAPLVRAEPILSREQLEAIRAELVKTSRARPAVSTPSLLLRVLFCAVCGEPAYKFAGGGRKHMRYRCRSMGFPKHCGNGTVAMAEWDAFCEEQVLDLLGDAERLEKVWVAGSDSAVELAEVNAELVDLTSLIGSPAYRAGSPQREALDARIAALAARQEELEGLEARPSGWEWRETGQRFGDWWREQDTAAKNTWLRSMSVRLTFDVRGGLTRTIDFGDLQEYEQHLRLGSVVERLHTGMS

SEQ ID NO: 12908 - protein, 500 aa, synthetic construct
MRALVVIRLSRVTDATTSPERQLESCQQLCAQRGWDVVGVAEDLDVSGAVDPFDRKRRPNLARWLAFEERPFDVIVAYRVDRLTRSTRHLQQLVHWAEDHKKLVVSATEAHFDTTTPFAAVVIALMGTVAQMELEAIKERNRSAAHFNIRAGKYRGSLPPWGYLPTRVDGEWRLVPDPVQRERILEVYHRVVDNHEPLHWVAHDLNRRGVLSPKDYFAQLQGREPQGRKWSATALKRSMISEAMLGYATLNGKTVRDDDGAPLVRAEPILTREQLGALRAELVKTSRAKPAVSTPSLLLRVLFCAVCGEPAYKFAGGGRKHPRYRCRSMGFPKHCGNGTVAMAEWDAFCEEQVMDLLGDAERLEKVWVAGSDSAVELAEVSAELVDLTSLIGSPAYRAGSPQREALDARIAALAARQEELEGLEARPSGWEWRETGQRFGDWWREQDTAAKNTWLRSMNVRLTFDVRGGLTRTVDFGDLQEYEQHLRLGSVVEGLHTGMS

SEQ ID NO: 12909 - protein, 500 aa, synthetic construct
MRALVVIRLSRVTDATTSPERQLESCQQLCAQRGWDVVGVAEDLDVSGAVDPFDRKRRPNLARWLAFEEQPFDVIVAYRVDRLTRSTRHLQQLVHWAEDHKKLVVSATEAHFDTTTPFAAVVIALMGTVAQMELEAIKERSRSAAHFNIRAGKYRGSLPPWGYLPARVDGEWRLVPDPVQRERILEVYHRVVDDHEPLHLVAHDLNRRGVLSPKDYFAQLRGREPQGRKWSATALKRSMISVAMLGYATLNGKIVRDDDGAPLVRAEPILTREQLEALRAELVKTSRAKPAVSTPSLLLRVLFCAVCGEPAYRFAGGGHKHPRYRCRSMGFPKHCGNGTVAMAEWDAFCEEQVLNLLGDVERLEKVWVAGSDSAVELAEVNAELVDLASLIGSPAYRAGSPQREALDARIAALAAHQEELKGLEARPPGWEWHKTGQRFGDWWREQDTAAKNTWLRSMNVRLTFDVRGGLTRTIDFGDLREYEQHLRLASVVERLHTGMS

SEQ ID NO: 12910 - protein, 500 aa, synthetic construct
MRALVVIRLSRVTDATTSPERQLESCRQLCAQRGWDVVGVAEDLDVSGAVDPFDRKRRPNLARWLAFEELPFDVIVAYRVDRLARSIRHLQQLVHWAEDHKKLVVSATEAHFDTTTPFAAVIIALMGTVAQMELEAIKGRSRSAAHFNIRAGKYRGSLPPWGYLPARVDGVWRLVPDPVQRERILEVYHRVVDNHEPLHLVAHDLNRRGVLSPRDYFAQLQGREPQGRKWSATALKRSMISEAMLGYATLNGRTVRDDDGAPLVRAEPILTREQQEALRAELVKTSRAKPAVSTPSLLLRVLFCAVCGEPAYKFAGGGRKHPRYRCRSMGFPKHCGNGTVAMAEWDAFCEEQVLNLLGDAERLEKVWVAGSDSAVELAEVNAELVDLTSLIGSPAYRAGSPQREALDARIAALAARQEELKGLEARPSGWEWRETGQRFGDWWREQDTAAKNTWLRSMNVRLTFDVRGGLTRTIDFGDLQEYEQHLRLGGVVERLHTGMS

SEQ ID NO: 12911 - protein, 500 aa, synthetic construct
MRALVVIRLSRVTDATTSPERQLESCQQLCAQRGWDVVGVAEDLDVSGAVDPFDRKRRPNLARWLAFEEQPFDVIVAYRVDRLARSIRHLQQLVHWAEDHKKLVVSATEAHFDTTTPFAAVVIALMGTVAQMELEAIKERSRSAAHFNIRAGKYRGSLPPWGYLPTRVDGVWRLVPDPVQRERILEVYHRVVNNHEPLHLVAHDLNRRGVLSPKDYFAQLQGREPQGRKWSATALKRSMISEAMLGYATLNGKIVRDDDGVPLVRAEPILTREQLEALRAELVKTSRAKPAVSTPSLLLRVLFCAVCGEPAYKFAGGGRKHPRYRCRSMGFPKHCGNGTVAMAEWDAFCEEQVLDLLGDAERLEKVWVAGSDSAVELAEVNAELVDLTSLIGSPAYRAGSPQREALDARIAALAARREELEGLEARPSGWEWRGTGQRFGDWWREQDTAAKNTWLRSMNVRLTFDVRGGLTRTIDFGDLQEYEQHLRLGSVVERLHTGMP

SEQ ID NO: 12912 - protein, 500 aa, synthetic construct
MRALVVIRLSRVTDATTSPERQLESCQQLCAQRGWDVVGVAEDLDVSGAVDPFDRKRRPNLARWLAFEEQPFDVIVAYRVDRLTRSTRHLQQLVHWAEDHKKLVVSATEAHFDTTTPFAAVVIALMGTVAQMELEAIRERNRSAAHFNIRAGKYRGSLPPWGYLPTRVDGEWRLVPDPVQRERILEVYHRVVDNHEPLHWVAHDLNRRGVLSPKDYFAQLQGREPQGRKWSATALKRSMISEAMLGYATLCGKTVRDDDGAPLVRAEPILTREQLEALRAELVKTSRATPAVSTPSLLLRVLFCAVCGEPAYKFAGGGRKHPRYRCRSMGFPKHCGNGTVAMAEWDAFCEEQVLNLLGDAERLEKVWVAGSDPAVELAEVNKELVDLTSLIGSPAYRAGSPQREALDARIAALAARQEELEGLEARPSGWEWRGTGQRFGDWWREQDTAAKNTWLRSMNVRLTFGVRGGLTRTIDFGDLQEYEQHLRLGSVVERLHTGMS

SEQ ID NO: 12913 - protein, 500 aa, synthetic construct
MRALVVIRLSRVTDTTTSPERQLESCQQLCALRGWDVVGVAEDLDVSGAVDPFDRKRRPNLARWLAFEEQPFDVIVAYRVDRLTRSIRHLQQLVHWAEDRKKLVVSATEAHFDTTTPFAAVVIALMGTVAQMELEAIKERSRSAAHFNIRAGKYRGSLPPWGYLPTRVDGEWRLAPDPVQRERILEVYHRVVDDHEPLHLVAHDLNRRGVLSPKDYFAQLRGREPQGRKWSATALKRSMISEAMLGYATLNGKTVRDDDGAPLVRAEPILTREQLEALRAELVKTSRAKPAVSTPSLLLRVLFCAVCGEPAYKFAGGGRKHPRYRCRSMGFPKHCGNGTVAMAEWDAFCEEQVLDLLGDAERLEKVWVAGSDSAVELAEVNAELVDLTSLIGSPAYRAGSPQREALDARIAALAARQEELEGLEARPSGWEWRETGQRFGDWWREQDTAAKNTWLRSMNVRLTFDVRGGLTRTIDFGDLQEYEQHSRLGSVVERLHTGMS

SEQ ID NO: 12914 - protein, 500 aa, synthetic construct
MRALVVIRLSRVTDATTSPERQLESCQQLCAQRGWDVVGVAKDLDVSGAVDPFDRKRRPNLARWLAFEEQPFDVIVAYRVDRLTRSIRHLQQLVHWAEDHKKLVVSATEAHFDMTTPFAAVVIALMGTVAQMELEAIKERSRSAAHFNIRAGKYRGSLPPWGYLPTRVDGEWRLAPDPVQRERILEVYHRVVDDHEPLHLVAHDLNRRGVLSPKDYFAQLQGREPQGRKWSATALKRSMISEAMLGYATLNGKTVRGDDGAPLVRAEPILTREQLEALRAELVKTSRAKPAVSTPSLLLRVLFCAVCGEPAYKFSGGGRKHPRYRCRSMGFPKHCGNGTVAMAEWDAFCEEQVLGLLGDAERLEKVWVAGSDSAVELAEVNAELVDLTSLIGSPAYRADSPQREALDARIAALAARQEELEGLEARPSGWEWRETGQRFGDWWREQDTAAKNTWLRSMNVRLTFDVRGGLARTIDLGDLQEYEQHLRSGSVVERLHTGMS

SEQ ID NO: 12915 - protein, 500 aa, synthetic construct
MRALVVIRLSRVTDATTSPERQLESCQQLCAQRGWNVVGVAEDLDVSGAVDPFDRKRRPNLARWLAFEEQPFDAIVVYRVDRLTRSIRHLQQLVHWAEDHKKLVVSATEAHFDTTTPFAAVVIALMGTVAQMELEAIKERSRSAAHFNIRAGKYRGSLPPWGYLPTRVDGEWRLAPDPVQRERILEVYRRVVDDHEPLHLVAHDLNRRGVLSPKDYFAQLQGREPQGRKWSATALKRSMISEAMLGYATLNGKTVRDDDGAPLVRAEPILTREQLEALRAELVKTSRAKPAVSTPSLLLRVLFCAVCGEPAYKFAGGGRKHPRYRCRSMGFPKHCGNGTVAMAEWDAFCEEQVLDLLGDAERLEKAWVAGSDSAVELAEVNAELVDLTSLIGSPAYRAGSPQREALDARIAALAARQEELEGLEARPSGWEWRETGQRFGDWWREQDTAAKNTWLRSMNVRLTFDVRGGLTRTVDFGDLQEYEQHLRLGSVVERLHTRRS

SEQ ID NO: 12916 - protein, 500 aa, synthetic construct
MRALVVIRLSRVTDATTSPERQLESCQQLCAQRGWDVVGVAEDLDVSGAVDPFDRKRRPNLARWLAFEEQPFDVVVAYRVDRLTRSTRHLQQLVHWAEDHKKLVVSATEAHFDTTTPFAAVVIALMGTVAQMELEAIKERNRSAAHFNIRAGKYRGSLPPWGYLPTRVDGEWRLVPDPVQRERILEVYHRVVDNHEPLHLVAHDLNRRGVLSPKDYFAQLRGREPQGRKWSATALKRSMISEAMLGYATLNGKTVRDDDGAPLVRAEPILTREQQEALRAELVKTSRAKPAVSTPSLLLRVLFCAVCGEPAYKFAGGGRKHPRYRCRSMGFLKHCGNGTVAMAEWDAFCEEQVLDLLGDAERLEKVWVAGSDSAVELAEVNAELVDLTSLIGSPAYRAGSPQREALDACIAALAARQEELEGLEARPSGWEWRETGQRFGDWWREQDTAAKNTWLRSMNVRLTFDVRGGLTRTIDFGDLLEYEQHLRLGSVVERLHTGMS

SEQ ID NO: 12917 - protein, 500 aa, synthetic construct
MRALVVIRLSRVTDATTSPERQLESCQQLCAQRGWDVVGVAEDLDVSGAVDPFDRKRRPNLARWLAFEEQPFDVIVAYRVDRLARSIRHLQQLVHWAEDHKKLVVSATEAHFDTTTPFAAVVIALMGTVAQMELEAIKERSRSAAHFNIRAGKYRGSLPPWGYLPARVDGEWRLVPDPVQRERILEVYHRVIDNHEPLHLVAHDLNRRGVLSPRDYFAQLRGREPQGRKWSATALKRSMISEAMLGYATLNGKTVRGDDGAPLVRAEPILTREQLEALRAVLVKTSRAKPAVSTPSLLLRVLFCAVCGEPAYKFAGGGRKHPRYRCRSMGFPKHCGNGTVAMAEWDAFCEEQVLNLLGDAERLEKVWVAGSDSAVELAEVNAELVDLTSLIGSPVYRAGSSQREALDARIAALAARQEELEGLEARPSGWEWRETGQRFGDWWREQDTTAKNTWLRSMNVRLTFDVRGELTRTVAFGDLQEYEQHLRLGSVVERLHTGMS

SEQ ID NO: 12918 - protein, 500 aa, synthetic construct
MRALVVIRLSRVTDATTSPERQLESCQQLCAQRGWDVVGVAEDLDVSGAVDPFDRKRRPNLARWLAFEEQPFDVIVAYRVDRLTRSTRHLQQLVHWAEDHKKLVVSATEAHFDTTTPFAAVIIALMGTVAQMELEAIKERSRSAAHFNIRAGKYRGSLPPWGYLPARVDGEWRLVPDPVQRERILEVYHRVVDNHEPLHLVAHDLNRRGVLSPKDYFAQLQGREPQGRKWSATALKRSMISGAMLGYATLSGKTVRDDDGAPLERAEPILTREQQEALRAELVKTSRAKPAVSTPSLLLRVLFCAVCGEPAYKFSGGGRKHPRYRCRSMGFPKHCGNGTVAMAEWDAFCEEQVLDLLGDAERLEKVWVAGSDSAVELAEVNAELVDLTSLIGSPAYRAGSPQREALDARIAVLAARQEELEGLEARPSGWEWRETGQRFGDWWREQDTAAKNTWLRSMNVRLTFDVHGGLTRTTDFGDLQEYEQHLRLGSVVERLHTGMS

SEQ ID NO: 12919 - protein, 500 aa, synthetic construct
MRALVVIRLSRVTDATTSPERQLESCQQLCAQRGWDVVGVAEDLDVSGAVDPFDRKRRPNLARWLAFEEQPFDVIVAHRVDRLARSIRHLQQLVHWAEDHKKLVVSATEAHFDTTTPFAAVVIALMGTVAQMELEAIKERNRSAAHFNIRAGKYRGSLPPWGYLPTRVNGEWRLVPDPVQRERILEVYHRVVDNHEPLHLVAHDLNRRGVLSPKDYFAQLQGREPQGRKWSATALKRSMTSEAMLGYATLNGKTVRDDDGAPLVRAEPILTREQREALRAELVKTSRAKPAVSTPSLLLRVLFCAVCGEPAYKFAGGGRKHPRYRCRSMGFPKHCGNGTVAMAEWDAFCEEQVLDLLGDAERLEKVWVAGPDSAVELAEVNAELVDLTSLVGSPAYRAGSPQREALDARIAALAARQEELEGLEARPPGWEWRETGQRFGDWWREQDTAAKNTWLRSMNVRLTFDVRGGLTRSIDFGDLQEYEQHLRLGSVVERLHTGMS

SEQ ID NO: 12920 - protein, 500 aa, synthetic construct
MRALVVIRLSRVTDATTSPERQLESCQQLCAQRGWDIVGVAEDLDVSGAVDPFDRKRRPNLARWLAFEEQPFDAIVAYRVDRLTRSIRHLQQLVHWAEDHKKLVVSATEAHFDTTTPFAAVVIALMGTVAQMELEAIKERNRSAAHFNIRAGKYRGSLPPWGYLPTRVDGEWRLVPDPVQRERILEVYRRVVDNHEPLHLVAHDLNRRGVLSPKDYFAQLRGREPQGRKWSATALKRSMISEAMLGYATLNGKTVRDDDGAPLVRAEPILTREQLEALRAELVKTSRAKPAVSTPSLLLRVLFCAVCGEPAYKFAGGGRKHPRYRCRSMGFPKHCGNGTVAMAEWDAFCEEQVLNLLGDAERLEKVWVAGPDSAVELAEVNAELVDLTSLIGSPAYRAGSPQREALDARIAALAARQEELEGLETRSSGWEWRGTGQRFGDWWHEQDTAAKNTWLRSMNVRLTFDVRGGLTRTIDFGELQEYEQHLRLGSVVERLHTGMS

SEQ ID NO: 12921 - protein, 500 aa, synthetic construct
MRALVVIRLSRVTDATTSPERQLESCQQLCAQRGWDVVGVAEDLDVSGAVDPFDRKRRPNLARWLAFEGQPFDVIVAYRVDRLTRSTRHLQQLVRWAEDHKKLVVSATEAHFDTTTPFAAVVIALMGTVAQMELEAIKERTRSAAHFNIRAGKYRGSLPPWGYLPTRVDGEWRLAPDPVQRERILEVYHRVVDNHEPLHLVAHDLNRRGVLSPKDYFAQLRGREPQGRKWSVTALKRSMISEAMLGYATLNGKTVRDDDGAPLVRAEPILTREQLEALRAELVKTSRARPAVSTPSLLLRVLFCAVCGEPAYKFAGGGRKHPRYRCRSMGFPKHCGNGTVTMAEWDAFCEEQVLDLLGDSERLEKVWVVGSDSAVELAEVNAELVDLTSLIGSPAYRAGSPQREALDARIAALATRQEELESLEARPSGWVWRETGQRFGDWWREQDTAAKNTWLRSMNVRLTFDVRGGLTRTIDFGNLQEYGQHLRLGSVVERLHTGMS

SEQ ID NO: 12922 - protein, 500 aa, synthetic construct
MRALVVIRLSRVTDATTSPERQLESCQQLCAQRGWDVVGVAEDLDVSGSVDPFDRKRRPNLARWLAFEEQPFDVIVAYRVDRLARSIRHLQQLVHWAEDHKKLVVSATEAHFDTTTPFAAVVIALMGTVAQMELEAIKERSRSAAHFNIRAGKYRGSLPPWGYLPARVDGVWRLVPDPVQRERILEVYHRVVDNHEPLHLVAHDLNRRGVLSPKDYFAQLRGREPQGRKWSATALKRSMISEAMLGYATLNGETVRDDDGAPLVRAEPILTREQQEALRAELVKTSRAKPAVSTPSLLLRVLFCAVCGEPAYKFAGGGRKHSRYRCRSMGFSKHCGNGTVAMAEWDAFCEEQVLDLLEDAERLEKVWVAGSDSAVELAEVNAELVDLTSLIGSPAYRAGSPQREALDARIAALAARQEELEGLEARPSGWEWRETGQRFGDWWREQDTTAKNTWLRSMNVRLTFDVRGGLTRTIDFGDLQEYEQHLRIGSVVERLHTGMS

SEQ ID NO: 12923 - protein, 500 aa, synthetic construct
MRALVVIRLSRVTDATTSPERQLESCQQLCAQRGWDVVGVAKDLDVSGAVDPFDRKRRPSLARWLAFEEQPFDVIVAYRVDRLTRSTRRLQQLVHWAEDHKKLVVSATEAHFDTTTPFAAVVIALMGTVAQMELEAIKERNRSAAHFNIRAGKYRGSLPPWGYLPTRVDGEWRLVPDPVQRERILEVYHRVVDNHEPLHLVAHDLNRRGVLSPRDYFAQLQGREPQGRKWSATALKRSMISEAMLGYATLNGKTVRDDSGAPLVRAEPILTREQLEALRAELVKTSRAKPAVSTPSLLLRVLFCAVCGEPAYKFSGGGRKHPRYRCRSMGFPKHCGNGTVATAEWDAFCEEQVLDLLGDAERLEKVWVAGSDSAVELAEVNAELVDLTSLIGSPAYRVGSPQREALDARIAALAARQEELEGLEARPSGWEWRETGQRFGDWWREQDTAAKNTWLRSMNVRLTFDVRGGLTRTIDFGDLQEYEQHLRLGSVVGRSHTGMS

SEQ ID NO: 12924 - protein, 500 aa, synthetic construct
MRALVVIRLSRVTDATTSPERQLESCQQLCAQRGWDVVGVAEDLDVSGAVDPFDRKRRPNLARWLAFEEQPFDVIVAYRVDRLTRSIRHLQQLVHWAEDHKKLVVSATEAHFDTTTPFAAVVIALMGTVAQMELEAIKERSRSAAHFNIRAGKYRGSLPPWGYLPARVDGEWRLVPDPVQRERILEVYHRVVDNHEPLHLVAHDLNRRGVLSPKDYFAQLRGREPQGRKWSATALKRSMISVAMLGYATLCGKIVRDDDGAPLVRAEPILTREQLEALRAELVKTSRAKPAVSTQSLLLRVLFCAVCGEPAYKFAGGGRKHPRYRCRSMGFPKHCGNGTVAMAEWDAFCEEQVLDLLGDAERLEKVWVAGSDSAVELAEVNAELMDLTSLIGSPAYRAGSPQREALDARIAALAARQEELEGLEARPSGWEWRGTGQRFGDWWREQDTTAKNTWLRSMNVRLTFNVRGGLTRTIDFGDLQEYEQHLRLGSVVERLHTGMS

SEQ ID NO: 12925 - protein, 500 aa, synthetic construct
MRALVVIRLSRVTDATTSPERQLESCQQLCAQRGWDVVGVAEDLDVSGAVDPFDHKRRPNLARWLAFEEQPFDAIVAYRVDRLTRSTRHLQQLVHWADDHKKLVVSATEAHFDTTTPFAAVVIALMGTVAQMELEAIKERSRSAAHFNIRAGKYRGSLPPWGYLPARVDGEWRLVPDPMQRERILEVYHRVVDNHEPLHLVAHDLNRRGVLSPKDYFAQLRGREPQGRKWSASALKRSMISEAMLGYATLNGKTVRDDDGAPLVRAEPILTRGQLEALRAELVKTSRAKPAVSTPSLLLRVLFCAVCGEPAYKFAGGGRKHPRYRCRSMGFPKHCGNGTVAMAEWDAFCEEQVLNLLGDAERLEKVWVAGSDSAVELAEVNAELVDLTSLIGSPAYRAGSPQREALDARIAALAARQEELEGLEARPSGWEWRETGLRFGDWWREQDTAAKNTWLRSMNVRLTFDVRGGLTRTIDFGDLHEYKQHLRLGSVVERLHTGMS

SEQ ID NO: 12926 - protein, 500 aa, synthetic construct
MRALVVIRLSRVTDATTSPERQLESCQQLCAQRGWDVVGVAEDLDVSGAVDPFDRKRRPNLARWLAFEEQPFDVIVAYRVDRLTRSIRHLQQLVHWAEDHKRLVVSATEAYFDTTTPFAAVVIALMGTVAQLELEAIKERSRSAAHFNIRAGKYRGSLPPWGYLPTRVDGEWRLAPDPVQRERILEVYHRVVDNHEPLHLVAHDLNRRGVLSPKDYFAQLQGREPQGRKWSATALKRSMTSEAMLGYATLNGKTVRDDDGAPLVRAEPILTREQLEALRAELVKTSRAKPAVSTPSLLLRVLFCAVCGEPAYKFSGGGHKHPRYRCRSMGFPKHCGNGTVAMAEWDAFCEEQVLDLLGDAERLEKVWVAGSDSAVELAEVNAELVDLTSLIGSPAYRAGSPQRETLDARIAALAARQAELEGLEARPPGWEWRETGQGFGDWWREQDTAAKNTWLRSMNVRLTFDVRGGLTRTIDFGDLQEYEQHLRLGSVVERLHTGMS

SEQ ID NO: 12927 - protein, 500 aa, synthetic construct
MRALVVIRLSRVTDATTSPERQLESCQQLCAQRGWDVVGVAEDLDVSGAVDPFDRKRRPNLARWLAFEEQPFDVIVAYRVDRLTRSTRHLQQLVHWAEDHKKLVVSATEAHFDTTTPFAAVVIALMGTVAQMELEAVKERSRSAAHFNIRAGKYRGSLPPWGYLPARVDGEWRLVPDPVQRERILEVYHRVVDNHEPLHLVAHDLNRRGVLSPKDYFAQLQGREPQGRKWSATALKRSMTSEAMLGHATLNGMTVRDDDGAPLVRAEPILTREQLEALRAELVKTSRAEPAVSTPSLLLRVLFCAVCGEPAYKFAGGGRKHPRYRCRSMGFPKHCGNGTVAMAEWDAFCEGQVLDLLGDAERLEKVWVAGSDSAVELAEVNAELVDLTSLIGSPAYRACSPQREALDARIAALAARQEELEGLEARPSGWEWRETGQRFGDWWREQDTAAKNTWLRSMNVRLTFDVRGGLTRTIDFGDLQEYEQHLRLGSVVERLHTGMS

SEQ ID NO: 12928 - protein, 500 aa, synthetic construct
MRALVVIRLSRVTDATTSPERQLESCQQLCAQRGWDVVGVAEDLDVSGSVDPFDRKRRPNLARWLAFEKQPFDVIVAYRVDRLARSIRHLQQLVHWAEDHKKLVVSATEAHFDTTTPFAAVVIALMGTVAQMELEAIRERSRSAAHFNIRAGKYRGSLPPWGYLPTRVDGEWRLVPDPVQRERILEVYHRVVDDHEPLHLVAHDLNRRGVLSPKDYFAQLQGREPQGRKWSATALKRSMISVAMLGYATLNGKTVRDDDGAPLVRAEPILTREQLEALRAELVKTSRAKPAVSTPSLLLRVLFCAVCGEPAYKFAGGGRKHPRYRCRSMGFPKHCGNGTVAMAEWDAFCEKQVLDLLGDAERLERVWVAGSDSAVELAEVNAELVDLTSLIGSPAYRAGSPQREALDARIAALAARQEELEGLEARPSGWEWRETGQRFGDWWREQDTAAKNTWLRSMNVRLTFDVRGGLTRTIDFGDLQEYEQHLHLGSVVERLHTGMS

SEQ ID NO: 12929 - protein, 500 aa, synthetic construct
MRALVVIRLSRVTDATTSPERQLESCQQLCAQRGWDVVGVAEDLDVSGAVDPFDRKRRPNLARWLAFEEQPFDVIVAYRVDRLTRSTRHLQQLVRWAEDHKKLVVSATEAHFDTTTPFAAVVIALMGTVAQMELEAMRERNRSAAHFNIRAGKYRGSLPPWGYLPARVDGEWRLVPDPVQRERILEVYHRVVDKHEPLHLVAHDLNRRGVLSPKDYFAQLRGREPQGREWSATALRRSMTSEAMLGYATLNGKIVRDDDGAPLVRAEPILTREQLEALRAELVKTSRAKPAVSTPSLLLRVLFCAVCGEPAYKFAGGGRKHPRYRCRSMGFPRHCGNGTVAMAEWDAFCEEQVLGLLGNAERLEKVWVAGSDSAVELAEVGAELVDLTSLIGSPAYRVGSPQREALDARIAALAARQEKLEGLEARPSGWEWRGTGQRFGDWWREQNTAAKNTWLRSMNVRLTFDVRGGLTRTIDFGDLQEYEQHLRLGSAVERLHTGMS

SEQ ID NO: 12930 - protein, 500 aa, synthetic construct
MRALVVIRLSRVTDATTSPERQLESCQRLCAQRGWDVVGVAEDLDVSGAVDPFDRKRRPNLARWLASEEQPFDVIVAYRVDRLARSIRHLQQLVHWAEDHKKLVVSATEAHFDTTTPFAAVVIALMGTVAQMELEAIKERSRSAAHFNIRAGKYRGSLPPWGYLPTRVDGEWRLVPDPVQRERILEVYHRVVDNHEPLHLVAHDLNRRGVLSPRDYFAQLQGREPQGRKWSATALKRSMTSEAMLGYATLNGKTVRDDDGAPLVRAEPILTREQLEALRAELVKTSRAKPAVSTPSLLLRVLFCAVCGEPAYKFAGGGRKHPRYRCRSMGFPKHCGNGTVAMAEWDAFCEEQVLDLLGDAERLEKVWVTGSDSAVELAEVNAELADLTSLIGSPAYRAGSPQREALDARIAALAARQGELEDLEARPSGWEWRETGQRFGDWWREQDTAAKNTWLRSMNVRLTFDVRGGLTRTIDFGDLQEYEQHLRLGSVVERLHTGMS

SEQ ID NO: 12931 - protein, 500 aa, synthetic construct
MRALVVIRLSRVTDTTTSPERQLESCQQLCAQRGWDVVGVAEDLDVSGAVDPFDRKRRPNLARWLAFEEQPFDAIVAYRVDRLTRSIRHLQQLVHWAEDHKKLVVSATEAHFDTTTPFAAVVIALMGTVAQMELEAIKERNRSAAHFNIRAGKYRGSLPPWGYLPTRVDGEWRLVPDPVQRERILEVYRRVVDNHEPLHLVAHDLNRRGVLSPKDYFAQLQGREPQGRKWSATALKRSMISEAMLGYAILNGKTVRDDDGAPLVRAEPILTREQQEALRAELVKTSRAKPAVATPSLLLRVLFCAVCGEPAYKFAGGGRKHPRYRCRSMGFPKHCGNGTVAMAEWDAFCEEQVLNLLGDTERLEKVWVAGSDSAVELAEVNAELVDLTSLIGSPAYRARSPQREALDARIAALAARQEELEGLEARPSGWEWRETGQRFGDWWREQDTAAKNTWLRSMNVRLTFDVRGGLTRTIDFGDLQECEQHLRLGSVVERLHTGTS

SEQ ID NO: 12932 - protein, 500 aa, synthetic construct
MRALVVIRLSRVTEATTSPERQLESCQQLCAQRDWDVVGVAEDLDVSGAVDPFDRKRRPNLARWLAFEEQPFDVIVAYRVDRLARSVRHLQRLVHWAEDHKKLVVSATEAHFDTTTPFAAVVIALMGTVAQMELEAIKERNRSAAHFNIRAGKYRGSLPPWGYLPTRVDGEWRLVPDPVQRERILEVYHRVVDNHEPLHLVAHDLNRRGVLSPKDYFAQLRGREPQGRKWSATALRRSMISEAMLGHATLNGKTVRDDDGAPLVRAEPILTREQLEALRAELVKTSRAKPAVSTPSLLLRVLFCAVCGEPAYKFAGGGRKHPRYRCRSMGFPKHCGNGTVAMAEWDAFCEEQVLDLLGDAERLEKVWVAGSDSAVELAEVNAELVDLTSLISSPAYRVGSPQREALDARIAALAARQEELEGLEARPSGWEWRGTGQRFGDWWREQDTAAKNTWLRSMNVRLTFDVRGGLTRPIDFGDLQEYEQHLRLGSVVERLHTGLS

SEQ ID NO: 12933 - protein, 500 aa, synthetic construct
MRALVVIRLSRVTDATTSPERQLESCQQLCAQRGWGVIGVAEDLDVSGAVDPFDRKRRPNLARWLAFEEQPFDAIVAYRVDRLTRSIRHLQQLVHWAEDHKKLVVSATEAHFDTTTPFAAVVIALMGTVAQMELEAIKERSRSAAHFNIRAGKYRGSLPPWGYLPTRVDGEWRLAPDPVQRERILEVYHRVVDNHEPLHLVAHDLNRRGVLSPKDYFAQLRGREPQGRKWSATALKRSMVSEAMLGYATLNGKTVRDDDGAPLVRAEPILTREQLEALRAELVKTSRAKPAVPTPSLLLRVLFCAVCGEPAYKFAGGGRKHPRYRCRSMGFPKHCGNGTVAMAEWDAFCEEQVLDLLGDAGRLEKVWVAGSDSAVELAEVNAELVDLTSLIGSPAYRAGSPQREALDARIAALAARQEELEGLEARPSGWEWRETGQRFGDWWREQDTAAKNAWLRSMNVRLTFGVRGGLTRTIDFGDLQEYEQHLRLGSVVKRLHTGMS

SEQ ID NO: 12934 - protein, 500 aa, synthetic construct
MRALVVIRLSRVTDATTSPERQLESCQQLCAQRGWDVVGVAEDLDVSGAVDPFDRKRRPNLASWLAFEEQPFDVIVAYRVDRLARSIRHLQQLVHWAEDHKKLVVSATEAHFDTTTPFAAVVIALMGTVAQMELEAIKERSRSAAHFNIRAGKYRGSLPPWGYLPTRVDGEWRLVPDPVQRERILEVYHRVVDKHEPLHLVAHDLNRRGVLSPKDYFAQLRGREPQGRKWSATALKRSMISVAMLGYATLNGKTVRDDDGAPLVRAEPILTSEQLEALRAELAKTSRAKPAVSTPSLLLRVLFCAVCGEPAYKFTGGGRKHPRYRCRSMGFPKHCGNGTVAMAEWDAFCEEQVLDLLGDVERLEKVWVAGSDSAVELAEVNAELVDLTSLIGSPAYRAGSPQREALDTRIAALAARQEELEGLEARPSGWEWRETGQRFGDWWREQDTAAKNTWLRSMNVRLTFDVRGGLTRTIDFGDLQEYEQHLRSGSVVERLHTGMS

SEQ ID NO: 12935 - protein, 500 aa, synthetic construct
MRALVVIRLSRVTDATTSPERQLESCQQLCAQRGWDVVGAAEDLDVSGAVDPFDRKRRPNLARWLAFEEQPFDVIVAYRVDRLTRSIRHLQQLVHWAEDHKKLVVSATEAHFDMTTPFAAVVIALMGTVAQMELEAIKERSRSAAHFNIRAGKYRGSLPPWGYLPTRVDGEWRLAPDPVQRERILEVYHRVVDNHEPLHLVAHDLNRRGVLSPKDYFAQLQGREPQGRKWSATALKRSMISVAMLGYATLNGKTVRDDDGVPLVRAEPILTREQLEALRAELVKTSRAKPAVSTPSLLLRVLFCAVCGEPAYKFAGGGRKHPRYRCRSMGFPKHCGNGTVAMAEWDAFCEEQVLGLLGDVERLEKVWVAGSDSAVKLAEVNAELVDLTGLIGSPAYRAGSPQREALDARIAALAARQEELEGLEARPSGWEWRGTGQHFRDWWREQDTAAKNTWLRSMNVRLTFDVRGGLTRTIDFGDLQEYEQHLRLGSVVERLHTGMS

SEQ ID NO: 12936 - protein, 500 aa, synthetic construct
MRALVVIRLSRVTDATTSPERQLESCRQLCAQRGWDVVGVAEDLDVSGSVDPFDRKRRPNLARWLAFEEQPFDVIVAYRVDRLARSIRHLQQLVHWAEDHKKLVVSATEAHFDTTTPFAAVVIALMGTVAQMELEAIKERNRSAAHFNIRAGKYRGSLPPWGYLPARVDGEWRLVPDPVQRERILEVYHRVVDNHEPLHLVAHDLNRRGVLSPKDYFAQLRGREPQGRKWSATALKRSMISEAMLGYATLNGKTVRDDDGAPLVRAEPILTREQLEALRAELVRTSRAKPAVSTPSLLLRVLFCAVCGEPAYKFAGGGRKHPRYRCRSMGFPKHCGNGTVAMAEWDAFCEEQVLDLLGDAERLEKVWVAGSDSAVELAEVNAELVDLTSLIGSPAYRAGSPQREALDARIAALAARQEELEGLEARPSGWEWRETGQRFGDWWREQDTAAKNTWLRSMNVRLTFDVRGGLTRTVDFGDLQEYERHLRSGSVVERLHTGMS

SEQ ID NO: 12937 - protein, 500 aa, synthetic construct
MRALVVIRLSRVTDATTSPERQLESCQQLCAQRGWDVVGVAEDLDVSGAVDPFDRKRRPNLARWLAFEEQPFDVIVAYRVDRLTRSVRHLQQLVHWAEDHKKLVVSATEAHFDTTTPFAAVIIALMGTVAQMELEAIKERSRSAAHFNIRAGKYRGSLPPWGYLPTRVDGEWRLVPDPVQRERILEVYHRVVDNHEPLHLVAHDLNRRGVLSPKDYFAQLRGREPQGRKWSATALKRSMISKAMLGYATLNGKTVRDDDGAPLVRAEPILTHEQLEALRAELVKTSRAKPAVSTPSLLLRVLFCAVCGEPAYKFTGGGRKHPRYRCRSMGFPKHCGNGTVAMAEWDAFCEERVLGLLGDAERLEKVWVAGSDSAVELAEVNAELVDLTSLIGSPAYRAGSPQREALDARIAALAARQEELEGLEARPSGWEWRETGQRLRDWWREQDTAAKNTWLRSMNVRLTFDVRGGLTRTIDFGDLQEYEQHLRLGSVVERLHTGMS

SEQ ID NO: 12938 - protein, 500 aa, synthetic construct
MRALVVIRLSRVTDTTTSPERQLESCQQLCAQRGWDVVGVAEDLDVSGAVDPFDRKRRPNLARWLAFEERPFDVIVAYRIDRLTRSIRHLQQLVHWAEDHEKLVVSATEAHFDTTTPFAAVVIALMGTVAQMELEAIKERSRSAAHFNIRAGKYRGSLPPWGYLPTRVDGEWRLVPDPVQRERILEVYHRVVDNHEPLHLVAHDLNRRGVLSPKDYFAQLRGREPQGRKWSATALKRSMISGAMLGYATLNGKTVRDDDGAPLVRAEPILTREQLEALRAELVKTSRAKPAVSTPSLLLRVLFCAVCGEPAYKFAGGGRKHLRYRCRSMGFPKHCGNGTVAMAEWDAFCEEQVLDLLGDAERLEKVWVVGSDSAVELAEVSAELVDLTSLIGSPAYRAGSPQREALDARIAALAARQEELEGLEARSSGWEWRETGQRFGDWWREQDTAAKNTWLRSMNVRLTFDVRGGLTRTIDFGDLQEYEQHLRLGSVVERLHTGMS

SEQ ID NO: 12939 - protein, 500 aa, synthetic construct
MRALVVIRLSRVTDATTSPERQLESCQQLCAQRDWDVVGVAEDLDVSGAVDPFDRKRRPNLARWLAFEEQPFDVIVAYRVDRLTRSIRHLQQLVHWAEDHKKLVVSATEAHFDTTTPFAAVVIALMGTVAQMELEAIKERSRSAAHFNIRAGKYRGSLPPWGYLPARVDGEWRLVPDPVQRERILEVYHRVVANHEPLHLVAHDLNRRGVLSPKDYFAQLQGREPQGRKWSATALKRSMISGAMLGYATLSGKTVRDDDGAPLVRAEPILTREQQEALRAELVKTSRAKPAVSTPSLLLRVLFCAVCGEPAYKFAGGGRKHPRYRCRSMGFPKHCGNGTVAMAEWDAFCEEQVLDLLGDAERLEKVWVAGSDSAVELAEVNAELVDLTSLIGSPAYRAGSPQREALGARIAALAARQEELEGLEARPSGWEWRETGQRFGDWWREQDTAAKNTWLRSMNVRLTFDVRGGLTRTIDFGDLQEYEQHLRSGNAVERIHTGMS

SEQ ID NO: 12940 - protein, 500 aa, synthetic construct
MRALVVIRLSRVTDATTSPERQLESCQQLCAQRGWDVVGVAEDLDVSGAVNPFDRKRRPNLARWLAFEEQPFDVIVAYRVDRLTRSTRHLQQLVHWAEDHKKLVVSATEAHFDTTTPFAAVVIALMGTVAQMELEAIKERSRSAAHFNIRVGKYRGSLPPWGYLPTRVDGEWRLVPDPVQRERISEVYHRVVDNHEPLHLVAHDLNRRGVLSPKDYFAQLRGREPQGRQWSATALKRSMISEAMLGYATLNGKTVRDDDGAPLVRAEPILTREQLEALRAVLVKTSRAKPAVSTPSLLLRVLFCAVCGEPAYKFAGGGRKHPRYRCRSMGFPKHCGNGTVAMAEWDAFCEEQVLDLLGDAERLEKVWVAGSDSSVELAEVNAELVDLTSLIGSPAYRAGSPQREALDARIAALAARQEELEGLEARPSGWEWRGTGQRFGDWWREQDTATKNTWLRSMNVRLTFDVRGGLTRTIDFGGLREYEQHLRLGSVVERLHTGMS

SEQ ID NO: 12941 - protein, 500 aa, synthetic construct
MRALVVIRLSRVTDATTSPERQLESCQQLCAQRGWDVVGVAEDLDVSGAVDPFDRKRRPNLARWLAFEERPFDVIVAYRVDRLTRSIRHLQQLVHWAEDHKKLVVSATEAHFDTTTPFAAVVIALMGTVAQMELEAIKERSRSAAHFNIRAGKYRGSLPPWGYLPARVDGEWRLVPDPVQRERILEVYHRVVDNHEPLHLVAHDLNRRGVLSPKDYFAQLQGREPQGRKWSATALKRSMISEAMLGYATLNGKTVRDDDGAPLVRAEPILTREQQEALRAELVKTSRAKPAVSTPSLLLRVLFCAVCGEPAYKFAGGGRKHPRYRCRSVGFPKHCGNGTVAMAEWDAFCEEQVLNLLGDAERLEKVWVAGSDFAVELAEVNAELVDLTSLIGSPAYRAGSPQHEALDARIAALVARQEELEGLEARPSGWEWRETGQRFGDWWREQDTAAKNTWLRSMNVRLTFDVRGGLTRTIDLGDLQEYEQHLRLGSVVERLHTGMS

SEQ ID NO: 12942 - protein, 500 aa, synthetic construct
MRALVVIRLSRVTDATTSPERQLESCQQLCAQRGWDVVGVAEDLDVSGAVDPFDRKRRPNLARWLAFEEHPFDVIVAYRVDRLTRSTRHLQQLVHWAEDHKKLVVSATEAHFDTTTPFAAVVIALMGTVAQMELEAIKERSRSAAHFNIRAGKYRGSLPPWGYLPARVDGEWRLVPDPVQRERILEVYHRVVDDHEPLHLVAHDLNRRGVLSPKDYFAQLQGREPQGRKWSATALKRSMISEAMLGYATLNGKTVRDDYGAPLVRAEPILTREQQEALRAELVKTSRAKPAVSTPSLLLRVLFCAVCGEPAYKFAGGGRKHPRYRCRSMGFPKHCGNGTVAMAEWDAFCEEQVLGLLGDAERLEKVWVAGSDSAVELAEVSAELVDLTSLIGSPAYRAGSPQREALDARIAALAARQEELEGLEARPSGWEWRETGRRFGDWWREQDTAAKNTWLRSMNVRLTFDVRGGLTRTIDFGELQEYEQHLRLGNAVERLHTGMS

SEQ ID NO: 12943 - protein, 500 aa, synthetic construct
MRALVVIRLSRVTDATTSPERQLESCQQLCAQRGWDVVGVAEDLDVSGAVDPFDRKRRPNLARWLAFEEQPFDVIVVYRVDRLTRSTRHLQQLVHWAEDHKKLVVSATEAHFDTTTPFAAVVIALMGTVAQMELEAIKERNRSAAHFNIRAGKYRGSLPPWGYLPTRVDGEWRLVPDPVQRERILEVYHRVVDNHEPLHLVAHDLNRRGVLSPKDYFAELRGREPQGRKWSATALKRSMISGAMLGYATLNGKTVRDDDGAPLVRAEPILTREQLEALRAELAKTSRAKPAVSTPSLLLRVLFCAVCGEPAYKFAGGERKHPRYRCRSMGFPKHCGNGTVAMAEWDAFCEEQVLNLLGDAERLEKVWVAGSDSAAELAEVNAELVDLTSLIGSPAYRAGSPQREALDARIAALAARQEGLEGLEARPSGWEWRETGQRFGDWWREQDTAAKNTWLRSMNVRLTFDVRGGLTRTIDFGDLQEYEQHLRLGRVVERLHTGMS

SEQ ID NO: 12944 - protein, 500 aa, synthetic construct
MRALVVIRLSRVTDATTSPERQLESCQQLCAQRGWDVVGVAEDLDVSGAVDPFDRKRRPNLARWLAFEEQPFDVIVVYRVDRLARSIRHLQQLVHWAEDHKKLVVSATEAHFDTTTPFAAVVIALMGTVAQMELEAIKERSRSAAHFNIRAGKYRGSLPPWGYLPARVDGEWRLVPDPVQRERILEVYHRVVDNHEPLYLVAHDLNRRGVLSPKDYFAQLQGREPQGRKWSATALKRSMISGAMLGYATLSGKTVRDDDGAPLVRAEPILTREQLEALRAELVKTSRAKPAVSIPSLLLRVLFCAVCGEPAYKFAGGGRKHPRYRCRSMGFPKHCGNGTVATAEWDAFCEEQVLDLLGDTERLEKVWVAGSDSAIELAEVNAELVDLTSLIGSPAYRAGSPQREALDARIAALAARREELEGLEARPSGWEWRETGQRFGDWWREQDTAAKNTWLRSMNVRLTFDVRGGLTRTIDFGDLQEYEQHLRLGNAVERLHTGMS

SEQ ID NO: 12945 - protein, 500 aa, synthetic construct
MRALVVIRLSRVTDATTSPERQLESCQQLCAQRGWDVVGVAEDLDVSGAVDPFDRKRRPNLARWLAFEEQPFDVIVAYRVDRLARSIRHLQQLVHWAEDHKKLVVSATEAHFDTTTPFAAVVIALMGTVAQMELEAIKERSRSAAHFNIRAGKYRGSLPPWGYLPTRVDGEWRLVPDPVQRERILEVYHRVVVNHEPLYLVAHDLNRRGVLSPKDYFAQLQGREPQGRKWSATALKRSMISEAMLGYATLNGKTVRDDDGAPLVRAEPILTRGQLEALRAELVRTSRAKPAVSTPSLLLRVLFCAVCGEPAYKFAGGGRKHPRYRCRSMGFPKHCGNGTVAMAEWDTFCEEQVLDLLGDAERLEKVWVAGSDSAVELAEVNAELVGLTSLIGSPAYRAGSPQREALDARIAALAARQGELEGLEARPSGWEWRETGQRFGDWWREQDTAAKNTWLRLMNVRLTFDVRGGLTRTIDFGDLQEYEQHLRLGSVVERLHTGMS

SEQ ID NO: 12946 - protein, 500 aa, synthetic construct
MRALVVIRLSRVTDATTSPERQLESCQLLCAQRGWDVVGVAEDLDVSGAVNPFDRKRRPNLARWLAFEEQPFDVIVAYRVDRLTRSTRHLQQLVHWAEDRKKLVVSATEAHFDTTTPFAAVVIALMGTVAQMELEAIKERSRSAAHFNIRAGKYRGSLPPWGYLPTRVDGEWRLVPDPVQRERILEVYHRVVDNHEPLHLVAHDLNRRGVLSPKDYFAQLQGREPQGRKWSATALKRSMTSEAMLGYATLNGKTVRDDDGAPLVRAEPILTREQLEALRAELVKTSRAKPAVSTPSLLLRVLFCAVCGEPAYKFSGGGRKHPRYRCRSMGFPKHCGNGTVAMAEWDAFCEEQVLDLLGDAERLEKVWVAGSDSAVELAEVNAELVDLTSLIGSPAYRAGSPQREALDARIAALAARQAELEGLEARPSGWEWRETGQRFGDWWREQDTAAKNTWLRSMNVRLTFDVRGGLTRTIDFGDLQEYEQHLRLGSVVERLHTGVP

SEQ ID NO: 12947 - protein, 500 aa, synthetic construct
MRALVVIRLSRVTDATTSPERQLESCQQLCAQRGWDVVGVAEDLDVSGAVDPFDRKRRPNLARWLAFEERPFDVIVAYRVDRLTRSIRHLQQLVHWAEDHKKLVVSATEAHFDTTTPFAAVVIALMGTAAQMELEAIKERSRSAAHFNIRAGKYRGSLPPWGYLPTRVDGEWRLAPDPVQRERILEVYHRVVDDHEPLHLVAHDLNRRGVLSPKDYFAQLRGREPQGRKWSATALKRSMISEAMLGYATLSGKTVRDDDGAPLVRAEPILTREQLEALRAELVKTSRAKPAVSTPSLLLRVLFCAVCGEPAYKFSGGGRKHPRYRCRSMGFPKHCGNGTVAMAEWDAFCEEQVLDLLGDAERLEKVWVAGSDSAVELAEVNAELVDLTSLIGSPAYRAGSPQREALDARIAALAARQEELEGLEARPSGWEWRETGQRFGDWWREQDTAAKNTWLRSMNVRLTFDVRGGLTRTIDFGDLREYEQHLRLGSVVERLHTGMS

SEQ ID NO: 12948 - protein, 500 aa, synthetic construct
MRALVVIRLSRVTDATTSPERQLESCQQLCAQRGWDVVGVAEDLDVSGAVDPFDRKRRPNLARWLAFEEQPFDVIVAYRVDRLTRSTRHLQQLVHWAEDHKKLVASATEAHFDTTTPFAAVVIALMGTVAQMELEAIKERNRSAAHFSIRAGKYRGSLPPWGYLPTCVDGEWRLAPDPVQRERILEVYHRVVDDHEPLHLVAHDLNRRGVLSPRDYFAQLRGREPQGRKWSATALKRSMISEAMLGYATLNGKIVRDDDGAPLVRAEPILTRGQLEALRAELVKTSRAEPAVSTPSLLLRVLYCAVCGEPAYKFAGGGRKHPRYRCRSMGFPKHCGNGTVAMAEWDAFCEEQVLDLLGDAERLEKVWVAGSDSAVELAEVNAELVDLTSLIGSPAYRAGSPQREALDARIAALAARQEELEGLEARPSGWEWRGTGQRFGDWWREQDTAAKNTWLRSMSVRLTFDVRGGLTRTIDFGDLQEYEQHLRLGSMVERLHTGMS

SEQ ID NO: 12949 - protein, 500 aa, synthetic construct
MRALVVIRLSRVTDATTSPERQLESCQQLCAQRDWDVVGVAEDLDVSGAVNPFDRKRRPNLARWLAFEEQPFDVIVAYRVDRLTRSIRHLQQLVHWAEDHKKLVVSATEAHFDTTTPFAAVVIALMGTVAQMELEAIKERSRSAAHFNIRAGKYRGSLPPWGYLPARVDGEWRLAPDPVQRERILEVYHRVVDNHEPLHLVAHDLNRRGVLSPKDYFAQLQGREPQGRKWSATALKRSMISGAMLGYATLNGKTVRGDDGAPLVRAEPILTREQLEALRAELAKTSRAKPAVSTPSLLLRVLFCAVCGEPAYKFAGGGRKHPRYRCRSMGFPKHCGNGTVAMAEWDAFCEEQVLGLLGDAERLEKVWVAGSDSAVELAEVNAELVDLTSLIGSPAYRAGSPQREALDARIAVLAARQEELEGLEARPSGWEWRETGQRFGDWWREQDTAAKNAWLRSMNVRLTFDVRGGLTRTIDFGDLQEYEQHSPLGSVVERLHTGMS

SEQ ID NO: 12950 - protein, 500 aa, synthetic construct
MRALVVIRLSRVTDATTSPERQLESCQQLCAQRGWDVVGVAEDLDVSGAVDPFDRKRRPNLARWLVFEEQPFDAIVAYRVDRLTRSIRHLQQLVHWAEDHKKLVVSATEAHFDTTTPFAAVVIALMGTVAQMELEAIKERNRSAAHFNIRAGKYRGSLPPWGYLPTRVDGEWRLVPDPVQRERILEVYRRVVDNHEPLHLVAHDLNRRGVLSPRDYFAQLRGREPQGRKWSATALRRSMISEAMLGYATLNGKIVRDDDGAPLVRAEPILTREQLEALRAELVKTSRVKPAVSTPSLLLRVLFCAVCGEPAYKFAGGGRKHPRYRCRSMGFPKHCGNGTVAMAEWDAFCEEQVLDLLGDAERLEKVWVAGSDSAVELAEVNAELVDLTSLIGSPAYRAGSPQREALDARIAALAARQEELESLEARPSGWEWRETGQRFGDWWREQDTAAKNTWLRSMNVRLTFDARGGLTRTIDFGDLQEYEQHLRSGSVVERLHTGMS

SEQ ID NO: 12951 - protein, 500 aa, synthetic construct
MRALVVIRLSRVTDATTSPERQLESCQQLCAQRGWDVVGVAEDLDVSGAVDPFDRKRRPNLARWLASEEQPFDAIVAYRVDRLTRSIRHLQQLVHWAEDHKKLVVSAAEAHFDTTTPFAAVVIALMGTVAQMELEAIRERNRSAAHFNIRAGKYRGSLPPWGYLPTRVDGEWRLVPDPVQRERILEVYHRVVDNHEPLHLVAHDLNRRGVLSPRDYFAQLRGREPQGRKWSATALKRSMISKAMLGYATLNGKTVRDDDGAPLVRAEPILTREQLEALRAELVKTSRAKPAVSTPSLLLRVLFCAVCGEPAYKFAGGGRKHPRYRCRSMGFPKHCGNGTVAMAEWDAFCEEQVLDLLGDAERLEKVWVAGSDSAVELAEVNAELVDLTSLIGSPAYRAGSPQREALDARIAALAARQEELEGLEARPSGWEWRETGQRFGDWWREQDTAAKNTWLRSMNVRLTFDVRGGLTRTIDFGGLQEYEQHLRLGSVVERLHTGMS

SEQ ID NO: 12952 - protein, 500 aa, synthetic construct
MRALVVIRLSRVTDATTSPERQLESCQQLCAQRGWDVVGVAEDLDVSGAVDPFDRKRRPNLARWLAFEEQPFDVIVAYRVDRLARSIRHLQQLVHWAEDHKKLVVSATEAHFDTTTPFAAVVIALMGTVAQMELEAIKERSRSAAHFNIRAGKYRGSLPPWGYLPTRVDGEWRLAPDPVQRERILEVYHRVVNNHEPLHLVAHDLNRRGVLSPKDYFAQLQGREPQGRKWSATALKRSMISVAMLGYATLNGKTVRDDDGAPLVRAEPILTREQLEALRTELVKTPRAKPAVSTPSLLLRVLFCAVCGEPAYKFAGGGRKHPRYRCRSMGFPKHCGNGTVAMAEWDAFCEEQVLNLLGGTERLEKVWVAGSDSAVELAEVNAELVDLTSLISSPAYRAGSPQREALDARIAALAARQGELEGLEARPSGWEWRETGQRFGDWWREQDTAAKNTWLRSMNVRLTFDVRGGLTRTIDFGDLQEYEQHLRLGSVVERLHTGMS

SEQ ID NO: 12953 - protein, 500 aa, synthetic construct
MRALVVIRLSRVTDATTSPERQLESCQQLCAQRGWDVVGVAEDLDVSGAVDLFDRKRRPNLARWLAFEEQPFDVIVAYRVDRLARSIRHLQQLVHWAEDHKKLVVSATEAHFDTTTPFAAVVIALMGTVAQMELEAIKERSRSAAHFNIRAGKYRGSLPPWGYLPTRVDGEWRLAPDPVQRERILEVYHRVVDNHEPLHLVAHDLNRRGVLSPKDYFAQLRGREPQGRKWSATALKRSMISEAMLGYATLNGKTVRDEDGAPLVRAEPILTRGQLEALRAELVKTSRAKPAVSTPSLLLRVLFCAVCGEPAYKFAGGGRKHPRYRCRSMGFPKHCGNGTVAMAEWDAFCEEQVLDLLGDAERLEKVWVAGSDSAVELAEVNAELVDLTSLIGSPAYRAGSPQREALDARIAALAARQEELEGLEARPSGWEWRETGQRLGDWWREQNTAAKNTWLRSMNVRLTFDVRGGLTRTIDFGDLQEYEQHLRLGSVVERLHTGMS

SEQ ID NO: 12954 - protein, 500 aa, synthetic construct
MRALVVIRLSRVTDATTSPERQLESCQQLCAQRGWDVVGVAEDLDVSGAVDPFDRKRRPNLARWLAFEEQPFDVIVAYRVDRLTRSTRHLQQLVHWAEDHKKLVVSATEAHFDTTTPFAAVVIALMGTVAQMELEAIKERNRSAAHFNIRAGKYRGSLPPWGYLPARVDGEWRLVPDPVQRERILEVYHRVVINHEPMHLVARDLNQRGVLSPKDYFAQLRGREPQGRKWSATALKRSMISEAMLGYATLNGKAVRDDGGAPLVRAEPILTREQLGALRAELVKTSRAKPAVSTPSLLLRVLFCAVCGEPAYKFAGGGRKHPRYRCRSMGFPKHCGNGTVAMAEWDAFCEGQVLDLLGDAERLEKVWVAGSDSAVELAEVNAELVDLTSLIGSPAYRAGSPQREALDARIAALTARQEELEGLETRPSGWEWRETGQRFGDWWREQDTAAKNTWLRSMNVRLTFDVRGGLTRTIDFGDLQEYEQHLRLGSVVERLHAGRS

SEQ ID NO: 12955 - protein, 500 aa, synthetic construct
MRALVVIRLSRVTDATTSPERQLESCQQLCTRRGWDVVGVAEDLDVSGAVDPFDRKRRPNLARWLAFEEQPFDAIVAYRVDRLTRSIRHLQQLVHWAGDHKKLVVSATEAHFDTTTPFAAVVIALMGTVAQMELEAIKERNRSAAHFNIRAGKYRGSLPPWGYLPARVDGEWRLAPDPVQCERILEVYHRVVDNHEPLHSVAHDLNRRGVLSPKDYFAQLQGREPQGRKWSATALKRSMISEAMLGYATLNGKTVRDDDGAPLVRAEPILTREQQEALRAELVKTSRAKPAVSTPSLLLRVLFCAVCGEPAYKFAGGGRRHPRYRCRSMGFLKHCGNGTVAMVEWDAFCEEQVLNLLGDAERLEKVWVAGSDSAVELAEVNAELVDLTSLIGSPAYRAGSPQREALDARIAALAARQEELEGLEARPSGWEWRGTGQRFGDWWREQDTAAKNAWLRSMNVRLTFDVRGGLTRTIDFGDLQEYEQRLRLGSVVERLHTGMS

SEQ ID NO: 12956 - protein, 500 aa, synthetic construct
MRALVVIRLSRVTDATTSPERQLESCQRLCAQRGWDVVGVAEDLDVSGAVDPFDRKRRPNLARWLAFEEQPFDVIVAYRVDRLTRSVRHLQQLVHWAEDHKKLVVSATEAHFDTTTPFAAVVIALMGTVAQMELEAIKERNRSAAHFNIRAGKYRGSLPPWGYLPTRVDGEWRLAPDPVQRERILEVYHRVVDNHEPLHLVAHDLNQRGVLSPRDYFAQLQGREPQGRKWSATALKRSMTSEAMLGYATLNGKTVRDGDGAPLVRAEPILTREQLEALRAELVKTSRAKPAVSTPSLLLRVLFCAVCGEPAYKFAGGGRKHPRYRCRSMGFPKHCGNGTIAMAEWDAFCEEQVLDLLGDAERLEKVWVAGSDSAVELAEVNAELVDLTSLIGSPAYRAGSPQREALGARIAALAARQEELEGFEARPSGWEWRETGQRFGDWWREQDTAAKNTWLRSMNVRLTFDVRGGLTRTIDFGDLQGYEQHLRLGSVVERLHTGMS

SEQ ID NO: 12957 - protein, 500 aa, synthetic construct
MRALVVIRLSRVTDATTSPERQLESCQQLCAQRGWDVVGVAEDLDVSGAVDPFDRKRRPNLARWLAFEEQPFDVIVAYRVDRLTRSVRHLQQLVHWAEDHKKLVVSATEAHFDTTTPFAAVVIALMGTVAQMELEAIKERSRSAAHFNIRAGKYRGSLPPWGYLPARVDGEWRLVPDPVQRERILEVYHRVVDNHEPLHLVAHDLNRRGVLSPKDYFAQLRGREPQGRKWSATALKRSMTSEAMLGYATLNGKTVRDDDGAPLVRAEPILTHEQLEALRAELVKTSRAKPAVSTPSLLLRVLFCAVCGEPAYKFAGGGRKHPRYRCRSMGSPKHCGNGTVAMVEWDAFCEEQVLDLLGDAERLEKVWVAGSDSAVELAEVNAELVDLTSLIGSPAYRAGSPQREALDARIAALAARQEELEGLEARPSGWEWRETGQRFGDWWREQDTAAKNTWLRSMDVRLTFDVRGGLTRTIDFGDLQEYEQHLRLGSVVERLHTGMS

SEQ ID NO: 12958 - protein, 500 aa, synthetic construct
MRALVVIRLSRVTDATTSPERQLESCQQLCAQRGWDVVGVAEDLDVSGAVDPFDRKRRPNLARWLAFEEQPFDVIVAYRVDRLARSIRHLQQLVHWAEDHKKLVVSATEAHFDTTTPFAAVVIALMGTVAQMELEAIKERSRSAAHFNIRAGKYRGSLPPWGYLPTRVDGEWRLVPDPVQRERILEVYHRVVDNHEPLHLVAHDLNRRGVLSPRDYFAQLRGREPQGRKWSATALKRSMISEAMLGYATLNGRTVRDDDGAPLVRAEPILTREQLEALRAELVKTSRAKPAVSTPSLLLRVLFCAVCGEPAYKFTGGGRKHPRYRCRSMGFPKHCGNGTVAMAEWDAYCEEQVLDLLGDAERLERVWVAGSDSAVEHAEVNAELVDLTSLIGSPAYRAGSPQREALDARIAALAARQEELEGLEARPSGWEWRETGQRFGDWWREQDTAAKNTWLRSMNVRLTFDVRGGLTRTIDFGDLQEYEQHLRLGSVVERLHTGMS

SEQ ID NO: 12959 - protein, 500 aa, synthetic construct
MRALVVIRLSRVTDATTSPERQLESCQQLCAQRGWDVVGVAEDLDVSGAVDPFDRKRRPSLARWLAFEEQPFDVIVAYRVDRLTRSIRHLQQLVHWAEDHKKLVVSATEAHFDTTTPFAAVVIALMGTVAQMELEAIKERSRSAAHFNIRAGKYRGSLPPWGYLPARVDGEWRLVPDPVQRERILEVYHRVVDDHEPLHLVAHDLNRRGVLSPKDYFAQLRGREPQGRKWSATALKRSMISEAMLGYATLNGKTVRDDDGAPLVRAEPILTREQQEALRAELVKTSRAKPAVSTPSLLLRVLFCAVCGEPAYKFAGGGRKHPRYRCRSMGFPKHCGNGTVAMAEWDAFCEEQVLGLLGDAERLEKVWVAGSDSAVELAEVNAELVDLTSLIGSPAYRAGSPQREALDARIAALAARQEELEGLEARPSGWEWRETGQRFGDWWREQDTAAKNTWLRSMNVRLTFDVRGGLTRTIDFGDLQEYEQHLRLGSVAERLHTGMS

SEQ ID NO: 12960 - protein, 500 aa, synthetic construct
MRALVVIRLSRVTDATTSPERQLESCQQLCAQRGWDVVGVAEDLDVSGAVDPFDRKRRPNLARWLAFEEQPFDVIVAYRVDRLARSVRHLQQLVRWAEDHKKLVVSATEAHFDTTTPFAAVVIALMGTVAQMELEAIKERSRSAAHFNIRAGKYRGSLPPWGYLATRVGGEWRLVPDPVQRERILEVYHRVVDNHEPLHSVAHDLNRRGVLSPKDYFAQLQGREPQGRRWSATAIKRSMISEAMLGYATLNGKIVRDDDGAPLVRAEPILTREQQEALRAELVKTSRAKPAVSTPSLLLRVLFCAVCGEPAYKFAGGGRKHPRYRCRSMGFPKHCGNGTVAMAKWDAFCEEQVLDLLGDAERLEKVWVAGSDSAVELAEVNAELVDLTSLIGSPAYRTGSPQREALDARIAALAARQEELEGLEARPSGWEWRGTGQRFGDWWREQDTAAKNTWLRSMNVRLTFDVRGGLTHTIDFGDLQEYEQHLRLGSVVERLHTGMS

SEQ ID NO: 12961 - protein, 500 aa, synthetic construct
MRALVVIRLSRVTDATTSPERQLESCQQLCAQRGWDVAGVAEDLDVSGAVDPFDRKRRPNLARWLAFEEQPFDVIVAYRVDRLTRSTRHLQQLVHWAEDHKKLVVSATEAHFDTTTPFAAVIIALMGTVAQMELEAIKERSRSAAHFNIRAGKYRGSLPPWGYLPTRVDGEWRLVPDPVQRERIIEVYHRVVDNHEPLHLVAHDLNRRGVLSPKDYFAQLQGREPQGRKWSATALKRSMISEAMLGYATLNGKTVRDDDGAPLVRAEPILTRGQQEALRAELVRTSRAKPAVSTPSLLLRVLFCAVCGEPAYKFAGGGRKHPRYRCRSMGFPKHCGNGTVAMTEWDAFCEEQVLDLLGDAERLEKVWVVGSDSAVELAEVNAELVDLTSLIGSSAYRAGSPQREALDARIAALAARQEELEGLKARPSGWEWRETGQRFGDWWREQDTAAKNTWLRSMNVRLTFDVRGGLTRTIDFGGLQEYEQHLRLGSVVERLHTGMS

SEQ ID NO: 12962 - protein, 500 aa, synthetic construct
MRALVVIRLSRVTEATTSPERQLESCQQLCAQRGWDVVGVAEDLDVSGAVDPFDRKRRPNLARWLAFEEQPFDVIVAYRVDRLTRSVRHLQQLVHWAEDHKKLVVSATEAHFDTTTPFAAVVIALMGTVAQMELEAIKERNRSAAHFNIRAGKYRGSLPPWGYLPTRVDGEWRLVPDPVQRERILEVYHRVVDNHEPLHLVAHDLNRRGVLSPRDYFAQLQGREPQGRKWSATALKRSMISGAMLGYATLNGKTVRDDDGAPLVRAEPILTREQLEALRAELVKTSRAKPAVSTPSLLLRVLFCAVCGEPAYKFAGGGRKHSRYRCRSMGFPKHCGNGTVAMAEWDAFCEEQVLDLLGDAERLEKVWVAGSDSAVELAEVNAELVDLTSLIGSPAYRASSPQREVLDARIAALAARQEELEGLEARPSGWEWRETGQRFGDWWREQDTAAKNAWLRSMNVRLTFDVRGGLTRTIDFGDLQEYEQHLRLGSVVERLHTGMS

SEQ ID NO: 12963 - protein, 500 aa, synthetic construct
MRALVVIRLSRVTDATTSPERQLESCQQLCAQRGWDVVGVAEDLDVSGAVDPFDRKRRPNLARWLAFEEQPFDVIVAYRVDRLTRSVRHLQQLVHWAEDHKKLVVSATEAHFDTTTPFAAVVIALMGTVAQMELEAIRERNRSAAHFNIRAGKYRGSLPPWGYLPTRVDGEWRLVLDPVQRERILEVYHRVVDNHEPLHLVAHDLNRRGVLSPKDYFAQLRGREPQGRKWSATALKRSMTSEAMLGYATLNGKTVRNDDGAPLVRAEPILTREQLEALRAELAKTSRAKPAVSTPSLLLRVLFCAVCGEPAYKFAGGGRKHPRYRCRSMGFPKHCGNGTVAMAEWDAFCEEQVLGLLGDAERLEKVWVAGSDSAVELAEVNAELVDLTSLIGSPAYRAGSPQREALDARVAALAARQEELEGSEARPSGWEWRETGQRFGDWWREQDTAAKNTWLRSMNVRLTFDVRGGLTRTIDFGDLQEYEQRLRLGSVVERLHTGMS

SEQ ID NO: 12964 - protein, 500 aa, synthetic construct
MRALIVIRLSRVTDATTSPERQLESCQQLCAQRGWDVVGVAEDLDVSGAVDPFDRKRRPNLARWLAFAEQLFDVIVAYRVDRLTRSVRHLQQLVHWAEDHKKLVVSATEAHFDTTTPFAAVVIALMGTVAQMELEAIKERNRSAAHFNIRAGKYRGSLPPWGYLPTRVDGEWRLVPDPVQRERILEVYRRVVDNHEPLHLVAHDLNRRGVLSPKDYFAQLRGREPQGRKWSATALKRSMISGAMLGYATLSGKTVRDDDGAPLVRAEPILTREQQEALRAELVKTSRAKPAVSTPSLLLRVLFCAVCGEPAYKFAGGGRKHPRYRCRSMGFPKHCGNGTVAMAEWDAFCEEQVLNLLGDAERLEKVWVAGSDSAVELAEVNKELVDLTSLIGSPAYRAGSPQREALDARIAALAARQEELEGLEARPSGWEWRETGQRFEDWWREQDTAAKNTWLRSMNVRLTFDVRDGLTRTIDFGDLQKYEQQLRLGSVVERLHTGMS

SEQ ID NO: 12965 - protein, 500 aa, synthetic construct
MRALVVIRLSRVTDATTSPERQLESCQQLCAQRGWDVVGVAEDLDVSGAVDPFDRKRRPNLARWLAFEEQPFDVIVAYRVDRLARSIRHLQQLVHWADDHKKLVVSATEAHFDTTTPFAAVVIALMGTVAQMELEAIKERSRSAAHFNIRAGKYRGSLPPWGYLPARVDGVWRLVPDPVQRERILEVYHRVVNNHEPLHLVAHDLNRRGVLSPKDYFAQLQGREPQGRKWSATALKRSMTSEAMLGYATLNGKTVRDDDGAPLVRAEPILAREQQEALRAELVKTSRAKPAVSTPSLLLRVLFCAVCGEPAYKFAGGGRKHPRYRCRSMGFPKHCGNGTVAMAEWDAFCEEQVLGLLGDAERLEKVWVAGSDSAVELAEVNAELVDLTSLIGSPAYRAGSPQREALDARIAALAARQKELEGLEARPSGWEWRETGQRFGDWWREQDTAAKNTWLRSMNVRLTFDVRGELTRTIDFGDLQEYEQHLRLGSVVERLHTGMS

SEQ ID NO: 12966 - protein, 500 aa, synthetic construct
MRALVVIRLSRVTDATTSPERQLESCQQLCAQRGWDVVGVAEDLDVSGAVDPFDRKRRPSLARWLAFEEQPFDVIVAYRVDRLTRSIRHLQQLVHWAEDHKKLVVSATEAHFDTTTPFAAVVIALMGTVAQMELEAIKERNRSAAHFNIRAGKYRGSLPPWGYLPTRVDGEWRLVPDPVQRERILEVYHRVVDNHEPLHLVAHDLNRRGVLSPKDYFAQLRGREPQGRKWSATALKRSMISEAMLGYATLNGKTVRDDDGAPLVRAEPILTREQQEALRAELDKTSRAKPAVSTPSLLLRVLFCAVCGEPAYKFAGGGRKHPRYRCRSMGFPKHCGNGTVAMAEWDAFCEEQVLDLLGDAERLEKVWVAGSDSAVELAEVNAELVDLTGLIGSPAYRAGSPQREALDARIAALAARQEELEGLEARPSGWEWRETGQRFGDWWREQDTAAKNTWLRSMNVRLTFDVRGGMTRTVDFGDLQEYEQHLRLGSVVERLHTGMS

SEQ ID NO: 12967 - protein, 500 aa, synthetic construct
MRALVVIRLSRVTDATTSPERQLESCQQLCAQRGWDVVGVAEDLDVSGAVDPFDRKRRPNLARWLAFEERPFDVIVAYRVDRLARSIRHLQQLVHWAEDHKKLVVSATEAHFDTTTPFAAVVIALMGTVAQMELEAIKERNRSAAHFNIRAGKYRGSLPPWGYLPARVDGVWRLVPDPVQRERILEVYHRVVDNHEPLHLVAHDLNRRGVLSPRDYFAQLRGRGPQGRKWSATALKRSMVSEAMLGYATLNGKTVRGDDGAPLVRAEPILTREQLEALRAELVKTSRAKPAVSTPSLLLRVLFCAVCGEPAYKFAGGGRKHPRYRCRSMGFPKHCGNGTVAMAEWDAFCEEQVLDLLGDAERLEKVWVAGSDSAVELAEVNAELVDLTSLIGSPAYRAGSPQREALDARIAALAARQEELEGLEARPSGWEWCETGQRFGDWWREQDTAAKNAWLRSMNVRLTFDVRGGLTRTIDFGDLQEYEQHLRLGSVAERLHTGMS

SEQ ID NO: 12968 - protein, 500 aa, synthetic construct
MRALVVIRLSRVTDATTSPERQLESCQQLCAQRGWDVVGVAEDLDVSGAVDPFDRKRRPNLARWLAFEEQPFDVIVAYRVDRLARSIRHLQQLVHWAEDHKKLVVSATEAHFDTTTPFAAVVIALMGTVAQMELEAIKERSRSAAHFNIRAGKYRGSLPPWGYLPTRVDGEWRLVPDPVQRERILEVYHRVVDSHEPLHLVAHDLNRRGVLSPKDYFAQLQGREPQGRKWSATALKRSMISEAMLGYATLNGKTVRDDDGAPLVRAEPILTREQQEALRAELVKTSRAKPAVSTPSLLLRVLFCAVCGEPAYKFAGGGRKHPRYRCRSMGFPKHCGNGTVAMAEWDAFCEEQVLDLLGDAERLEKVWVAGSDSAVELAEVNAELVDLTSLIGSPAYRAGSPQREALDARIAALAARQEELEGLEARPSGWEWRETGQRFGDWWREQDTAAKNTWLRSMNVRLMFDVRGGLTRTIDFGDLLEYEQHLRLGSVVERLHTGMS

SEQ ID NO: 12969 - protein, 500 aa, synthetic construct
MRALVVIRLSRVTDATTSPERQLESCQQLCAQRGWDVVGVAEDLDVSGAVDPFDRKRRPNLARWLAFEEQPFDVIVAYRVDRLTRSTRHLQQLVHWAEDHKKLVVSATEAHFDTTTPFAAVVIALMGTVAQMELEAIKERNRSAAHFNIRAGKYRGSLPPWGYLPTRVDGEWRLVPDPVQRERILEVYHRVVDNHEPLHLVAHDLNRRGVLSPRDYFAQLQGREPQGRKWSATALKRSMISKAMLGYATLNGKTVRDDDGAPLVRAEPILTREQLEALRAELVKTSRAKPAVSAPSLLLRVLFCAVCGEPAYKFAGGGRKHPRYRCRSMGFPKHCGNGTVAMAEWDAFCEEQVLDLLGDAERLEKVWVAGSDSAVELAEVSAELVDLTSLIGSPAYRAGSPQREALDARIAALAARQEELEGLEARPSGWEWRETGQRFGDWWREQDTAAKNTWLRSMNVRLTFDVRGGLTRTVDFGELQEYEQQLRLGSVVERLHTGMS

SEQ ID NO: 12970 - protein, 500 aa, synthetic construct
MRALVVIRLSRVTDATTSPERQLESCQQLCAQRGWDVVGVAEDLDVSGAVDPFDRKRRPNLARWLAFEEQPFDVIVAYRVDRLARSIRHLQQLVHWAEDHKKLVVSATEAHFDTTTPFAAVVIALMGTVAQMELEAIKERSRSAAHFNIRAGKYRGSLPPWGYLPTRVDGEWRLAPDPVQRERILEVYHRVVDNHEPLHLVAHDLNRRGVLSPKDYFAQLQGREPQGRKWSATALKRSMTSEAMLGYATLNGKTVRGDDGAPLVRAEPILTREQLGALRAELVKTSRARPAVSTPSLLLRVLFCAVCGEPAYKFAGGGRKHLRYRCRSMGFPKHCGNGTVAMAEWDAFCEEQVLGLLGDAERLEKVWVAGSDSAVELAEVNAELVDLTSLIGSPAYRAGSPQREALDARIAALAARQEELEGLEARPSGWEWRETGQRFGDWWREQDTAAKNTWLRSMNVRLTFDVRGGLTRTIDFGDLQEYEQHLRLGSVVERLHTGMS

SEQ ID NO: 12971 - protein, 500 aa, synthetic construct
MRALVVIRLSRVTDATTSPERQLESCQQLCAQRGWDVVGVAEDLDVSGAVDPFDRKRRPNLARWLAFEEQPFDVIVAYRVDRLTRSTRHLQQLVRWAEDHKKLVVSATEAHFDTTTPFAAVVIALMGTVAQMELEAIKERNRSAAHFNIRAGKYRGSLPPWGYLPTRVDGEWRLVPDPVQRERILEVYHRVVDNHEPLHLVAHDLNRRGVLSPRDYFAQLQGREPQGCKWSATALKRSMISEAMLGHATLNGKTVRDDDGAPLVRAEPILTREQLEALRAELVKTSRAKPAVSTPSLLLRVLFCAVCGEPAYKFTGGGRKHPRYRCRSMGFPKHCGNGTLAMAEWDAFCEEQVLNLLGDAERLEKVWVAGSDSAVKLAEVNAELVDLTSLIGSPAYRAGSPQREALDARIAALAARQEELEGLEARPSGWEWRGTGQRFGDWWREQDTAAKNTWLRSMNVRLTFDVRGGLTRTIDFGDLQEYEQHLRLGSVVERLHTGMS

SEQ ID NO: 12972 - protein, 500 aa, synthetic construct
MRALVVIRLSRVTDATTSPERQLESCQQLCAQRGWDVVGVAEDLDVSGAVDPFDRKRRPNLARWLAFEERPFDVIVAYRVDRLTRSIRHLQQLVHWAEDHKKLVVSATEAHFDTTTPFAAVVIALMGTVAQMELEAIKERNRSAAHFNIRAGKYRGSLPPWGYLPTRVDGVWRLVPDPVQRERILEVYHRVVDNHEPLHLVAHDLNRRGVLSPKDYFAQLRGREPQGRKWSATALKRSMISVAMLGYATLNGKTVRDDDGAPLVRAEPILTREQLEALRAELVKTSRAKPAVSTPSLLLRVLFCAVCGEPAYKFSGGGRKHPRYRCRSMGFPKHCGNGTVAMAEWDAFCEEQVLDLLGDAERLEKVWVAGSDSAVELAEVNAELVDLTSLIGSPAYRAGSPQREALDARIAALAARQGELEGLEARPSGWEWRGTGQRFGDWWREQDTAAKNTWLRSMNVRLTFDVRGGLTRTIDFGDLQEYEQHLRLGSVVERLHTGMS

SEQ ID NO: 12973 - protein, 500 aa, synthetic construct
MRALVVIRLSRVTDATTSPERQLESCQQLCAQRGWDVVGVAEDLDVSGAVDPFDRKRRPNLARWLAFEEQPFDVIVAYRVDRLTRSTRHLQQLVHWAEDHKKLVVSATEAHFDTTTPFAAVVIALMGTVAQMELEAIKERSRSAAHFNIRAGKYRGSLPPWGYLPARVDGEWRLVPDPVQRERILEVYHRVVDNHEPLHLVAHDLNRRGVLSPKDYFAQLQGREPQGRKWSATALKRSMISEAMLGYATLSGKTVRDDDGAPLVRAEPILTREQQEALRAELVKTSRAKPVVSTPSLLLRVLFCAVCGEPAYKFAGGGRKHPRYRCRSMGFPKHCGNGTVAMAEWDVFCEEQVLSLLGDAERLEKVWVAGSDSAVELAEVNAELVDLTSLIGSPAYRVGSPQREALDARIAALAARQGELEGLEARPSGWEWRGTGQRFGDWWREQDTAAKNAWLRSMNVRLTFDVRGGLTRTIDFGDLQEYEQHLRLGSVVERLHTGMS

SEQ ID NO: 12974 - protein, 500 aa, synthetic construct
MRALVVIRLSRVTDATTSPERQLESCQQLCAQRGWDVVGVAEDLDVSGAVDPFDHKRRPNLARWLAFEEQPFDVIVAYRVDRLTRSTRHLQQLVHWAEDHKKLVVSATEAHFDTTTPFAAVVTALMGTVAQMELEAIKERSRSAAHFNIRAGKYRGSLPPWGYLPTRVDGEWRLAPDPVQRERILEVYHRVVDNHEPLHLVAHDLNRRGVLSPKDYFAQLQGREPQGRKWSATALKRSMTSEAMLGYATLNGKTVRDDDGAPLVRAEPILTREQLEALRAELVKTSRAKPAVSTPSLLLRVLFCAVCGEPAYKFSGGGRKHPRYRCRSMGFPKHCGNGTVAMAEWDAFCEEQVLDLLGDAERLEKVWVAGSDSAVELAEVNAELVDLTSLIGSPAYRAGSPQREALDARIAALAARQEELEGLEARPSGWEWRETGQRFGDWWREQDTAAKNTWLRSMNVRLTFDVRGGLTRTIDFGGLQEYEQHLRLGSVVERLHTGMP

SEQ ID NO: 12975 - protein, 500 aa, synthetic construct
MRALVVIRLSRVTDATTSPERQLESCQQLCAQRGWNVVGVAEDLDVSGAVDPFDRKRRPDLARWLAFEEQPFDVIVAYRVDRLARSVRHLQQLVRWAEDHKKLVVSATEAHFDTTTPFAAVVIALMGTVAQMELEAIKERSRSAAHFNIRAGKYRGSLPPWGYLPMRVDGEWRLVPDPVQRERILEVYHRVVDNHEPLHLVAHDLNRRGVLSPKDYFAQLQGREPQGRKWSATALKRSMISVAMLGYATLNGKTVRDDDGAPLVRAEPILTREQQEALRAELVKTSRAKPAVSTPSLLLRVLFCAVCGEPAYKFAGGGRKHPRYRCRSMGFPKHCGNGTVAMAEWDAFCEEQVLDLLGDAERPEKVWVAGSDSAVELAEVNAELVDLTSLIGSPAYRAGSPQREALDARIAALAARQEELEGLEARPSGWEWRETGQRFGDWWREQDTAAKNTWLRSMNVRLTFDVRGGLTRTIDFGDLREYEQHLRLGSVVERLHTGMS

SEQ ID NO: 12976 - protein, 500 aa, synthetic construct
MRALVVIRLSRVTDATTSPERQLESCQQLCDQRGWDVVGVAEDLDVSGAVDPFDRKRRPNLARWLAFEEQPFDVIVAYRVDRLARSIRHLQQLVHWAEDHKKLVVSATEAHFDTTTPFAAVVIALMGTVAQMELEAIKERSRSAAHFNIRAGKYRGSLPPWGYLPTRVDGEWRLVPDPVQRERILEVYHRVVSNHEPLHLVARDLNRRGVLSPKDYFAQLQGREPQGRKWSATALKRSMISEAMLGYATLNGKTVRDDDGAPLVRAEPILTREQLEALRAELVKTSRAKPAVSAPSLLLRVLFCAVCGEPAYKFAGGGRKHPRYRCRSMGFPKHCGNGTVAMAEWDAFCEEQVLDLLGDAERLEKVWVAGSDSAVELAEVNAELVDLTSLIGSPAYRAGSPQREALDARIAALAARQEELEGLEARPSGWEWRETGQRFGDWWREQDTAAKNTWLRSMNVRLTFDVRGGLTRTIDFGDLQEYEQHSRLGSVVERLHTGMS

SEQ ID NO: 12977 - protein, 500 aa, synthetic construct
MRALVVIRLSRVTDATTSPERQLESCQQLCAQRGWDVVGVAEDLDVSGAVDPFDRKRRPNLARWLAFEERPFDVIVAYRVDRLTRSIRHLQQLVHWAEDHKKLVVSATEAHFDTTTPFAAVVIALMGTVAQMELEAIKERSRSAAHFNIRAGKYRGSLPPWGYLPTRVDGEWRLAPDPVQRERILEVYHRVVDNHEPLHLVAHDLNRRGVLSPKDYFAQLQGREPQGRKWSATALKRSMISVAMLGYATLNGKTVRDNDGAPLVRAEPILTRGQLEALRAELVKTSRAKPAVSTPSLLLRVLFCAVCGEPAYKFAGGGRKHPRYRCRSMGFPKHCGNGTVAMAEWDAFCEEQVLDLLGDAERLEKVWVAGSDSAVELAEVNAELVDLTSLIGSPAYRAGSPQREALDARIAALAARQEELEGLGARPSGWEWRETGQRFGDWWREQDAAAKNTWLRSMNVRLTFDVRGGLTRTIDFGDLQEYERHLRLGSVVERLHTGMS

SEQ ID NO: 12978 - protein, 500 aa, synthetic construct
MRALVVIRLSRVTDATTSPERQLESCQQLCAQRGWDVVGVAEDLDVSGAVDPFDRKRRPNLARWLAFEEQLFDVIVAYRVDRLTRSTRHLQQLVHWAEDHKKLVVSATEAHFDTTTPFAAVVIALMGTVAQMELEAIKERNRSAAHFNIRAGKYRGSLPPWGYLPSRVDGEWRLVPDPVQRERILEVYHRVVDNHEPLHLVAHDLNRRGVLSPRDYFAQLQGREPQGRKWSATALKRSMISEAMLGYATLNGKTVRDDDGAPLVRAEPILTREQLEALRAELVKTSRAKPAVSTPSLLLRVLFCAVCGEPAYKFAGGGRKHPRYRCRSMGFPKHCGNGTVAMAEWDAFCEEQVLDLLGDAERLEKVWVAGSDSAVELAEVNAELVDLTSLIGSPAYRAGSPQREALDARIAALAARREELEGLEARPSGWEWRETGQRFGDWWREQDTAAKNTWLRSMNVRLTFDVRGELTRTIDFGDLQEYEQHLRLGSVVERLHTGMP

SEQ ID NO: 12979 - protein, 500 aa, synthetic construct
MRALVVIRLSRVTDATTSPERQLESCQQLCAQRGWDVVGVAEDLDVSGAVDPFDRKRRPNLARWLAFEGQPFDVIVAYRVDRLARSIRHLQQLVHWAEDHKKLVVSATEAHFDTTTPFAAVVIALMGTVAQMELEAIKERIRSAAHFNIRAGKYRGSLPPWGYLPTRVDGEWRLAPDPVQRERILEVYHRVVDNHEPLHLVAHDLNRRGVLSPKDYFAQLRGRKPQGRKWSATALKRSMISEAMLGYATLNGKTVRNDDGAPLVRAEPILTREQLEALRAELVKTSRAKPAVSTPSLLLRVLFCAVCGEPAYKFAGGGRKHPRYRCRSMGFPKHCGNGTVAMAEWDAFCEEQVLNLLGDAERLEKVWVAGSDTVVELAEVNAELVDLTSLIGSSAYRAGSPQREALDARIAALAARQEELEGLEARPSGWEWRETGQRFGDWWREQDTAAKNTWLRSMNVRLTFDVRGGLTRTIDFGDLQEYEQHLRLGGVVERLHTGMP

SEQ ID NO: 12980 - protein, 500 aa, synthetic construct
MRALVVIRLSRVTDATTSPERQLESCQQLCAQRGWDVVGVAEDLDVSGAVDPFDRKRRPNLARWLAFEELPFDAIVAYRVDRLTRSIRHLQQLVHWAEDHKKLVVSATEAHFDTTTPFAAVVIALMGTVAQMELEAIKERNRSAAHFNIRAGKYRGSLPPWGYLPTRVDGEWRLAPDPVQRERILEVYHRVVDNHEPLHLVAHDLNRRGVLSPKDYFAQLRGREPQGRKWSATALKRSMTSEAMLGYATLNGKTVRDDDGAPLVRAEPILTREQLEALRAELVKTSRAKPAVSTPSLLLRVLFCAVCGEPAYKFAGGGRKHPRYRCRSMGFPKHCGNGTVAMAEWDAFCEEQVLNLLGNAERLEKVWVAGSDSAVELAEVDTELVDLTSLIGSPAYRAGSPQREALDARIAALAARQEELGGLEARPSGWEWRGTGQRFGDWWREQDTAAKNTWLRSMNVRLTFDVRGGLTRTIDFGDLQEYEQHLRLGSVVERLHTGMS

SEQ ID NO: 12981 - protein, 500 aa, synthetic construct
MRALVVIRLSRVTDATTSPERQLESCQQLCAQRGWDVVGVAEDLDVSGAVDPFDRKRRPNLARWLAFEEQPFDVIVAYRVDRLARSIRHLQQLVHWAEDHKKLVVSATEAHFDTTTPFAAVVVALMGTVAQMELEAIKERSRSAAHFNIRAGKYRGSLPPWGYLPTRVDGEWRLAPDPVQRERILEVYHRVVDNHEPLHLVAHDLNRRGVLSPRDYFAQLQGREPQGRKWSATALKRSMISGAMLGYATLNGKTVCDDDGAPLVRAEPILTREQLEALRAELVKTSRAKPAVSTPSLLLRVLFCAVCGEPAYKFAGGGRKHPRYRCRSMGFPKHCGNGTVAMAEWDAFCEEQVLDLLGDAERLEKVWVAGSDSAVELAEVNAELVDLTSLIGSPAYRAGSPQREALDTRIAALAARQEELESLEARPSGWEWRETGQRFGDWWREQDTAAKNTWLRSMNVRLTFDVRDGLTRTIDFGDLQEYEQHLRLGSVVERLHTGMS

SEQ ID NO: 12982 - protein, 500 aa, synthetic construct
MRALVVTRLSRVTDATTSPERQLESCQQLCAQRGWDVVGVAEDLDVSGAVDPFDRKRRPNLARWLAFEEQPFDVIVAYRVDRLTRSIRHLQQLVHWAEDHKKLVVSATEAYFDTTTPFAAVVIALMGTVAQMELEAIKERSRSAAHFNIRAGKYRGSLPPWGYLPTRVDGEWRLAPDPVQRERILEVYHRVVDNHEPLHLVAHDLNRRGVLSPKDYFAQLQGREPQGRKWSATALKRSMTSEAMLGYATLNGKTVRDDDGAPLVRAEPILTREQLEALRTELVKTSRAKPAVSTPSLLLRVLFCAVCGEPAYKFSGGGRKHPRYRCRSMGFPKHCGNGTVAMAEWDAFCEEQVLDLLGDAERLEKVWVAGSDSAVELAEVNAELVDLMSLIGSPAHRAGSPQREALDARIAALAARQEELEGLEARPSGWEWRRTGQRFGDWWREQNTAAKNTWLRSMNVRLTFDVRGGLTRTIDFGDLQEYEQHLRLGSVVERLHTGMS

SEQ ID NO: 12983 - protein, 500 aa, synthetic construct
MRALVVIRLSRVTDATTSPERQLESCQQLCAQRGWDVVGVAEDLDVSGAVDPFDRKRRPNLARWLAFEEQPFDVVVAYRVDRLARSVRHLQQLVHWAEDHKKLVVSATEAHFDTTTPFAAVVIALMGTVAQMELEAIKERNRSAAYFNIRAGKYRGSLPPWGYLPTRVDGEWRLVPDPVQRERILEVYHRVVVNHEPLHLVAHDLNRHGVLSPRDYFAQLRGREPQGRKWSATALKRSMISEAMLGYATLNGKTVRDDDGAPLVRAEPILTRGQLEALRAELVKTSRAKPAVSTPSLLLRVLFCAVCGEPAYKFAGGGRKHSRYRCRSMGFPKHCGNGTVAMAEWDAFCEEQVLDLLGDAERLEKVWVAGSDSAVELAEVNAELVDLASLIGSPAYRAGSPQREALDARIAALAARQEELEGLEARPSGWEWRETGQRFGDWWREQDTAAKNTWLRSMNVRLTFDVRGGLTRTIDFGDLQEYEQHLRLGSVVERLHTGMS

SEQ ID NO: 12984 - protein, 500 aa, synthetic construct
MRALVVIRLSRVTDATTSPERQLESCQQLCAQRGWDVVGVAEDLDVSGAVDPFDRKRRPNLARWLAFGEQPFDVIVAYRVDRLTRSIRHLQQLVHWAEDHKKLVVSATEAHFDTTTPFAAVVIALMGTVAQMELEAIKERNRSAAHFNIRAGKYRGSLPPWGYLPTRVDGEWRLVPDPVQRERILEVYHRVVDNHESLHLVAHDLNRRGVLSPKDYFAQLRGREPQGRKWSATALKRSMISVAMLGYATLNGKTVRDDDGAPLVRAEPILTREQLEALRAVLVKTSRAKPAVSAPSLLLRVLFCAVCGEPAYKFAGGGRKHPRYRCRSMGFPKHCGNGTVAMAEWDAFCEEQVLDLLGDAERLEKVWVAGSDTAAELAEVNAELVDLTSLIGSPAYRVGSPQREALDARIAALAARQEKLEGLGARPSGWEWRETGQRFGDWWREQDTATKNTWLRSMNVRLAFDVRGGLTRTVDFGDLQEYEQHLRLGSVVERLHAGMS

SEQ ID NO: 12985 - protein, 500 aa, synthetic construct
MRALVVIRLSRVTDATTSPERQLESCQQLCAQRGWDVVGVAEDLDVSGAVDPFDRKRRPNLARWLAFEEQPFDVIVAYRVDRLTRSVRHLQRLVHWAEDHEKLVVSATEAHFDTTTPFAAVVIALMGTVAQMELEAIKERSRSAAHFNIRAGKYRGSLPPWGYLPARVDGEWRLVPDPVQRERILEVYHRVVDDHEPLHLVAHDLNRRGVLSPKDYFAQLRGREPQGRKWSTTALKRSMISEAMLGYATLNGKTVRDDDGAPLVRAEPILTREQQEALRAELVKTSRAKPAVSTPSLLLRVLFCAVCGEPAYKFSGGGRKHPRYRCRSMGFPKHCGNGTVAMAEWDAFCEEQVLGLLGDVERLEKVWVAGSDSAVELAEVNAELVDLTSLIGSPAYRADSPQRETLDARIAALAARQEELEGLEARPSGWEWRETGQRFGDWWREQDTAAKNTWLRSMNVRLTFDVRGGLTRTIDLGGLQEYEQHLRLGSVVGRLHTGMS

SEQ ID NO: 12986 - protein, 500 aa, synthetic construct
MRALVVIRLSRVTDATTSPERQLESCQQLCAQRGWDVVGVAEDLDVSGAVDPFDRKRRPNLARWLAFEEQPFDVIVAYRVDRLTRSIRHLQQLVHWAEDHKKLVVSATEAHFDTTTPFAAVVIALMGTVAQMELEAIKERSRSAAHFNIRAGKYRGSLPPWGYLPARVDGEWRLAPDPVQRERILEVYHRVVDDHEPLHLVAHDLNRRGVLSPRDYFAQLRGREPQGRKWSATALKRSMISEAMLGYATLNGKTVRDDDGAPLVRAEPILTRGQLEALRAELVKTSRAKPAVSTPSLLLRVLFCAVCGEPAYKFSGGGRKHPRYRCRSMGFPKHCGNGTVAMAEWDAFCEGQVLDLLGDAERPEKVWVAGSDSAVELAEVNAELVDLTSLIGSPAYRAGSPQREALDARIAALAARQEELEGLEARPSGWEWRGTGQRFGGWWREQDTAAKNTWLRSMNVRLTFDVRGGLTRTIDFGDLQEYEQHLRLGSAVECLDTGMS

SEQ ID NO: 12987 - protein, 500 aa, synthetic construct
MRALVVIRLSRVTDATTSPERQLESCQQLCAQRGWDIVGVAEDLDVSGAVDPFDRKRRPNLARWLAFEEQPFDVIVAYRVDRLTRSVRHLQRLVHWAEDHKKLVVSATEAHFDTTTPFAAVVIALMGTVAQMELEAIKERSRSAAHFNIRAGKYRGSLPPWGYLPTRVDGEWRLVPDPVQRERILEVYRRVVDNHEPLHLVAHDLNRRGVLSPKDYFAQLRGREPQGRKWSATALKRSMTSEAMLGYATLNGKTVRDDDGAPLVRAEPILTREQLEALRVELAKTSRAKPAVSTPSLLLRVLFCAVCGEPAYKFAGGGRKHPRYRCRSMGFPKHCGNGTVAMAEWDAFCEEQVLDLLGDAERLEKVWVAGSDSAVELAEVNAKLVDLTSLIGSPAYRAGSPQREALDARIAALAARQEELEGLEARPSGWEWCETGQRFGDWWREQDTAAKNTWLRSMNVRLTFDVRGGLTRTIDFGDLQEYEQHSRLGSAVERLHTGMS

SEQ ID NO: 12988 - protein, 500 aa, synthetic construct
MRALVVIRLSRVTDATTSPERQLESCQQLCAQRGWDVVGVAEDLDVSGAVDPFDRKRRPNLARWLAFEEQPFDVIVAYRVDRLARSIRHLQQLVHWAEDHKRLVVSATEAHFDTTTPFAAVVIALMGTVAQMELEAIRERNRSAAHFNIRAGKYRGSLPPWGYLPTRVDGEWRLVPDPVQRERILEVYHRVVVNHEPLHLVAHDLNRHGVLSPKDYFAQLQGREPQGRKWSATALKRSMTSVTMLGYATLNGKTVRDDNGAPLVRAEPILTREQLEALRAELVKTSRAKPAVSTPSLLLRVLFCAVCGEPAYKFSGGGRKHPRYRCRSMDFPKHCGNGTVAMAEWDAFCEEQVLDLLGDAERLEKVWVAGSDSAVELAEVSAELVDLTSLIGSPAYRAGSPQREALDARIAALAARQEELEGLEARPSGWEWRETGQRFGDWWREQDTAAKNTWLRSMNVRLTFDVRGGLTRTIDFGDLQEYEQHLRLGGVVERLHTGMS

SEQ ID NO: 12989 - protein, 500 aa, synthetic construct
MRALVVIRLSRVTDATTSPERQLESCQQLCAQRGWDVAGVAEDLDVSGAVDPFDRKRRPNLARWLAFEEQPFDVIVAYRVDRLTRSVRHLQQLVHWAEDHKKLVVSATEAHFDTTTPFAAVVIALMGTVAQMELEAIKERSRSAAHFNIRAGKYRGSLPPWGYLPARVDGEWRLVPDPVQRERILEVYHRVVDNHEPLHLVAHDLNRRGVLSPKDYFAQLRGREPQGRKWSATALKRSMISVAMLGYATLCGKTVRDDDGAPLVRAEPILTREQLEALRAELVKTSRARPAVSTPSLLLRVLFCAVCGEPAYKFAGGGRKHPRYRCRSMGFPKHCGNGTVAMAEWDAFCEEQVLNLLGDAERLEKVWVAGTDSAVELAEVNKELVDLTSLIGSPAYRAGSPQREALDARIAALAARQEELEGLEARPSGWEWRGTGQRFGDWWREQDTAAKNTWLRSMNVRLTFDVRGGLTRTIDFGDLQEYGQHLRLGSVVERLHTGMS

SEQ ID NO: 12990 - protein, 500 aa, synthetic construct
MRALVVIRLSRVTDATTSPERQLESCQQLCAQRGWDVVGVAEDLDVSGAVDPFDRKRRPNLARWLAFEEQPFDVIVAYRVDRLARSIRHLQQLVHWAEDHKKLVVSATEAHFDTTTPFAAVVIALMGTVAQMELEAIKERSRSAAHFNIRAGKYRGSLPPWGYLPTRVDGEWRLVPDPVQRERILEVYHRVVDNHEPLHLVAHDLNRRGVLSPKDYFAQLRGREPQGRKWSATALKRSMISEAMLGYATLNGKTVRDDDGAPLVRAEPILTREQLEALRAELVKTSRAKPAVSTPSLLLRVLFCAVCGEPAYKFFGGGRKHPRYRCRSMGFPKHCGNGTVAMAEWDAFCEEQVLDLLGDAERLEKVWVAGSDSAVELAEVNAELVDLTSLIGSPAYRAGSPQREALDARIAALAARQGELEGLEARPSGWEWRETGQRFRDWWREQDTAAKNTWLRSMNVRLTFDVRGGLTRTIDFGDLQEYEQHLRLGSVVERLHTGMS

SEQ ID NO: 12991 - protein, 500 aa, synthetic construct
MRALVVIRLSRVTDATTSPERQLESCQQLCAQRGWDVVGVAEDLDVSGAVDPFDRKRRPNLARWLAFEEQPFDVIVAYRVDRLARTIRHLQQLVHWAEDHKKLVVSATEAHFDTTTPFAAVVIALMGTVAQMELEAIKERSRSAAHFNIRAGKYRGSLPPWGYLPTRVDGEWRLVPDPAQRERILEVYRRVVDNHEPLHLVAHDLNRRGILSPKDYFAQLRGREPQGRKWSATALKRSMISEAMLGYATLNGKIVRDDDGAPLVRAEPILTREQLEALRAELVKTSRAKPAVSTPSLLLRVLFCAVCGEPAYKFAGGGRKHPRYRCRSMGFPKHCGNGTVAMAEWDAFCEEQVLDLLGDAERLEKVWVAGSDSAVKLAEVNAELVDLTSLIGSPAYRAGSPQREALDARIAALVARQEELEGLEARPSGWEWRETGQRFGDWWREQDTAAKNTWLRSMNVRLTFDVRGGLTRTIDFGDLLEYEQHLRLCSMVERLHTGMS

SEQ ID NO: 12992 - protein, 500 aa, synthetic construct
MRTLVVIRLSRVTDATTSPERQLESCQQLCAQRGWDVVGVAEDLDVSGAVDPFDRKRRPNLARWLAFEEQPFDAIVAYRVDRLTRSIRHLQQLVHWAEDHKKLVVSATETHFDTTTPFAAVVIALMGTVAQMELEAIKERNRSAAHFNIRAGKYRGSLPPWGYLPTRVDGEWRLVPDPVQRERILEVYHRVVDNHEPLHLVAHDLNRRGVLSPKDYFAQLRGREPQGRKWSATALKRSMISEAMLGYATLNGKTVRDDDGAPLVRAEPILTREQLEAVRAELVKTSRAKPAVSTPSLLLRVLFCAVCGEPAYKFAGGGRKHSRYRCRSMGFPKHCGNGTVAMAEWDAFCEEQVLDLLGDAERLEKVWVAGSDSAVELAEVNAELVDLTGLIGSPAYRAGSPQREALDARIAALAARQEELEGLEARPSGWEWRETGQRFGDWWREQDTAAKNTWLRSMNVRLTFDVRGGLTRTIDFGDLQEYEQHLRLGSVVERLHTGMS

SEQ ID NO: 12993 - protein, 500 aa, synthetic construct
MRALVVIRLSRVTDATTSPERQLESCQQLCAQRDWDVVGVAEDLDVSGAVDPFDRKRRPNLARWLAFEEQPFDVIVAYRVDRLTRSIRHLQQLVHWAEDHKKLVVSATEAHFDTTTPFAAVVIALMGTVAQMELEAIKERSRSAAHFNIRAGKYRGSLPPWGYLPARVDGEWRLVPDPVQRERILEVYHRVVDNHEPLHLVAHDLNRRGVLSPKDYFAQLQGREPQGRKWSATALKRSMTSGAMLGYATLSGKTVRDDGGAPLVRAEPILTREQQEALRAELVKTSRAKPAVSTPSLLLRVLFCAVCGEPAYKFAGGGRKHPRYRCRSMGFPKHCGNGTVAMAEWDAFCEEQVLDLLGDVERLEKVWVTGSDSAVELAEVSAELVDLTSLIGSPAYRAGSPQREALDARIAALVARQEELEGLEARPSGWEWRETGQRFGDWWREQDTAAKNTWLRSMNVRLTFDVRGGLTRTIDFGDLQEYEQHLRLGSVVERLHTGMS

SEQ ID NO: 12994 - protein, 500 aa, synthetic construct
MRTLVVIRLSRVTEATTSPERQLESCQQLCAQRGWDVVGVAEDLDVSGAVDPFDRKRRPNLARWLAFEEQPFDVIVAYRVDRLTRSIRHLQQLVHWAEDHKKLVVSATEAHFDMTTPFAAVVIALMGTVAQMELEAIKERNRSAAHFNIRAGKYRGSLPPWGYLPTRVDGEWRLAPDPVQRERILEVYHRVVDNHEPLHLVAHDLNRRGVLSPKDYFAQLRGREPQGRKWSATALKRSMISEAMLGYATLNGKTVRDDDGAPLVRAEPILTREQQEALRAELVKTSRAKPAVSTPSLLLRVLFCAVCGEPAYKFAGGGRKHPRYRCRSMGFPKHCGNGTVAMAEWDAFCEEQVLDLLGDAERLEKVWVAGSDSAVELAEVNAELVDLTSLIGSPAYRAGSPQREALDARIAALAARQEELEGLEARPSGWEWRETGQRFGDWWREQVTAAKNTWLRSMNVRLTFDVRGGLTRTIDFGDLQEYEQHLRLGSVVERLRTGMS

SEQ ID NO: 12995 - protein, 500 aa, synthetic construct
MRALVVIRLSRVTDATTSPERQLGSCQQLCAQRGWDVVGVAEDLDVSGAVDPFDRKRRPNLARWLAFEEQPFDVIVAYRVDRLARSIRHLQQLVHWAEDHKKLVVSATEAHFDTTTPFAAVVIALMGTVAQMELEAIKERSRSAAHFNIRAGKYRGSLPPWGYLPSRVDGEWRLVPDPVQRERILEVYHRVVDNHEPLYLVAHDLNRRGVLSPKDYFAQLRGREPQGRKWSATALKRSMISEAMLGYATLNGKTVRDGDGAPLVRAEPILTREQLGALRAELVKTSRAKPAVSTPSLLLRVLFCAVCGEPAYKFAGGGRKHPRYRCRSMGFPKHCGNGTVAMAEWDAFCEEQVLDLLGDAERLEKVWVAGSDSAVELAEVNAELVDLTSLIGSPAYRAGSPQREALDARIAALAARREELEGLEARPSGWEWRETGQRFGDWWREQDTAAKNTWLRSMNVRLTFDVRGGLTRTIDYGDLQEYEQHLRLGSVVERLHTGMP

SEQ ID NO: 12996 - protein, 500 aa, synthetic construct; identical to SEQ ID NO: 10908

SEQ ID NO: 12997 - protein, 500 aa, synthetic construct
MRALVVIRLSRVTDATTSPERQLESCQQLCAQRGWDVVGVAEDLDVSGAVDPFDRKRRPNLARWLAFEERPFDVIVAYRVDRLTRSIRHLQQLVHWAEDHKKLVVSATEAHFDTTTPFAAVVIALMGTVAQMELEAIKERSRSAAHFNIRAGKYRGSLPPWGYLPTRVDGEWRLAPDPVQRERILEVYHRVVDNHEPLHLVAHDLNRRGVLSPKDYFAQLQGREPQGRKWSATALKRSMISVAMLGYATLNGKTVRDDDGAPLVRAEPILTRGQLEALRAELVKTSRAKPAVSTPSLLLRVLFCAVCGEPAYKFAGGRRKHPRYRCRSMGFPKHCGNGTVAMAEWDTFCEEQVLDLLGDAERLEKVWVVGSDSAVELAEVNAELVDLTSLIGSPAYRAGSPQREALDARIAALAARQEELEGSEAHPSGWEWRGTGQRFGDWWREQDTAAKNTWLRSMNVRLTFDVRGGLTRTIDFGDLQEYEQRLRLGSVVERLHTGMS

SEQ ID NO: 12998 - protein, 500 aa, synthetic construct
MRALVVIRLSRVTDATTSPERQLESCQQLCAQRGWDVVGVAEDLDVSGAVDPFDRKRRPNLARWLAFEEQPFDVIVAYRVDRLTRSIRHLQQLVHWAEDHKKLVVSATEAHFDTTTPFAAVVIALMGTVAQMELEAIKERNRSAAHFNIRAGKYRGSLPPWGYLPTRVNGEWRLVPDPVQRERILEVYHRVVDNHEPLHLVAHDLNRRGVLSPKDHFAQLRGREPQGRKWSATALKRSMISGAMLGYATLNGKTVRDDDGAPLVRAEPILTREQQEALRAELVKTSRAKPAVSAPSLLLRVLFCAVCGEPAYKFAGGGRKHPRYRCRSMGFLKHCGNGTVAMVEWDAFCEEQVLNLLGDAERLEKVWVAGSDSAVELAEVNAELVDLTSLIGSPAYRAGSPQREALDARIAALAARQEELGGLEARPSGWEWRGTGQRFGDWWREQDTAAKNAWLRSMNVRLTFDVRGGLTRTINFGDLQEYEQRLRLGSVVERLHTGMS

SEQ ID NO: 12999 - protein, 500 aa, synthetic construct
MRALVVIRLSRVTDATTSPERQLESCQQLCAQRGWDVVGVAEDLDVSGAVDPFDRKRRPNLARWLAFEERPFDVIVTYRVDRLARSIRHLQQLVHWAEDNKKLVVSATEAHFDTTTPFAAVVIALMGTVAQMELEAIKERNRSAAHFNIRAGKYRGSLPPWGYLPTRVDGEWRLVPDPVQRERILEVYHRVVDNHEPLHLVAHDLNRRGVLSPRDYFAQLQGREPQGRKWSATALKRSMISGAMLGYATLNGKTVRVDDGAPLVRAEPILTREQLEALRAELVKTSRTEPAVSTPSLLLRVLFCAVCGEPAYKFSGGGRKHPRYRCRSMGFPKHCGNGTVAMAEWDAFCEEQVLNLLGDAERLEKVWVAGSDSAVELAEVNAELVDLTSLIGSPAYRAGSPQRKALDARIAALAARQEELEGLEARPSGWVWRETGQRFGDWWREQDTTAKNTWLRSMNVRLTFDVRGGLTRTIDFGDLQEYEQHLRLGSVVERLHTGMS

SEQ ID NO: 13000 - protein, 500 aa, synthetic construct
MRALAVIRLSRVTDATTSPERQLESCQQLCAQRGWDVVGVAEDLDVSGAVDPFDRKRRPNLARWLAFEEQPFDVIVAYRVDRLTRSIRHLQQLVHWAEDHKKLVVSATEAHFDMTTPFAAVVIALMGTVAQMELEAIKERNRSAAHFNIRAGKYRGSLPPWGYLPTRVDGEWRLVPDPVQRERILEVYRRVVDNHEPLHLVAHDLNRRGVLSPRDYFAQLRGREPQGRKWSATALKRSMISEAMLGYATLNGKTVRDDDGAPLVRAEPILAREQLGALRAELVKTSRAKPAVSTPSLLLRVLFCAVCGEPAYKFAGGGRKHPRYRCRSMGFPKHCGNGTVAMAEWDAFCEEQVLDLLGDAERLEKVWVAGSDSAVELAEVDAELVDLTSLIGSPAYRTGSPQREALDARIAALAARQEELEGLEARPSGWEWRGTGQRFGDWWREQGTAAKNTWLRSMNVRLTFDVRGGLTRTIDFGDLQEYEQHLRLGSVVERLHTGMS

SEQ ID NO: 13001 - protein, 500 aa, synthetic construct
MRALVVIRLSRVTDATTSPERQLESCQQLCAQRGWDVVGVAEDLDVSGAVDPFDRKRRPNLARWLAFEEQPFDVIVAYRVDRLARSIRHLQQLVHWAEDHKKLVVSATEAHFDTTTPFAAVVIALMGTVAQMELEAIKERNRSAAHFNIRAGKYRGSLPPWGYLPTRVDGEWRLAPDPVQRERILEVYHRVVDNHEPLHLVAHDLNRRGVLSPKDYFAQLRGREPQGRKWSATALKRSLISEVMLGYATLNGKTVRDDDGAPLVRAEPILTREQLEALRAELVKTSRAKPAVSTPSLLLRVLFCAVCGEPAYKFAGGGRKHPRYRCRSMGFLKHCGNGTVAMAEWDAFCEEQVLDLLGGAERLEKVWVAGSDSAVELAEVDAELVDLTSLIGSPAYRAGSPQREALDARIAALTARQEELEGLEARPSGWEWRGTGQRFGDWWHEQDTAAKNTWLRSMNVRLTFDVRGGLARTIDFGDLQEYEQHLRLGSVVERLHTGMS

SEQ ID NO: 13002 - protein, 500 aa, synthetic construct
MRALVVIRLSRVTDATTSPERQLESCQQLCAQRGWDVVGVAEDLDVSGAVDPFDHKRRPNLARWLAFEEQPFDVIVAYRVDRLTRSTRHLQQLVHWADDHKKLVVSATEAHFDTTTPFAAVVIALMGTVAQMELEAIKERSRSAAHFNIRAGKYRGSLPPWGYLPARVDGVWRLVPDPVQRERILEVYHRVVDNHEPLHLVAHDLNRRGVLSPKDYFAQLQGREPQGRKWSATALKRSMISEAMLGHAILNGKTVRGDDGAPLVRAEPILTREQLEALRAELAKASRAKPAVSTPSLLLRVLFCAVCGEPAYKFAGGGRKHPRYRCRSMGFPKHCGNGTVAMAEWDAFCEEQVLDLLGDAERLEKVWVAGSDSAVELAEVNAELVDLSSLISSPAYRAGSPQREALDARIAALAARQEELEGLEARPSGWEWRETGQRFEDWWREQDTAAKNAWLRSMNVRLTFDVRGGLTRTIDFGDLQEYERHLRSGSVVERLHTGMS

SEQ ID NO: 13003 - protein, 500 aa, synthetic construct
MRALVVIRLSRVTDATTSPERQLESCQQLCAQRGWDVVGVAEDLDVSGAVDPFDRKCRPNLARWLAFEEQPFDVIVAYRVDRLTRSTRHLQQLVHWADDHKKLVVSATEAHFDTTTPFAAVVIALMGTVAQMELEAIKERSRSAAHFNIRAGKYRGSLPPWGYLPARVDGVWRLVPDPVQRERILEVYHRVVNNHEPLHLVAHDLNRRGVLSPKDYFAQLQGREPQGRKWSTTALKRSMISEAMLGYATLNGKTVRDDDGAPLVRAEPILTREQQEALRAELVKTSRAKPAASTPSLLLRVLFCAVCGEPAYKFAGGGRKHPRYRCRSMGFPKHCGNGTVAMAEWDAFCEEQVLDLLGDAERLEKVWVAGSDSAVELAEVNAELVDLTSLIGSPAYRAGSPQREALDARIAALAARQEELEGLEARPAGWEWRETGRRFGDWWREQDTAAKNTWLRSMNVRLTFDVRGGLTRTIDFGDLQEYEQHLRLGSVVERLHTGMS

SEQ ID NO: 13004 - protein, 500 aa, synthetic construct
MRALVVVRLSRVTDATTSPERQLESCQQLCAQRGWDVVGVAKDLDVSGAVDPFDRKRRPNLARWLAFEEQPFDVIVAYRVDRLARSIRHLQQLVHWAEDHKKLVVSATEAHFDTTTPFAAVVIALMGTVAQMELEAIKERSRSAAHFNIRAGKYRGSLPPWGYLPTRVDGEWRLAPDPVQRERILEVYHRVVDNHEPLHLVAHDLNRRGVLSPRDYFAQLRGREPQGRKWSATALKRSMISEAMLGHATLNGKTVRDEDGAPLVRAEPILTREQLEALRAELVKTTRAKPAVSTPSLLLRVLFCAVCGEPAYKFAGGGRKHPRYRCRSMGFPKHCGNGTVAMAEWDAFCEEQVLDLLGDAERLEKVWVAGSDPAVELAEVNAELVDLTSLIGSPAYRAGSPQREALDARIAALAARQEELEGLEARPSGWEWRETGQRFGDWWREQDTAAKNTWLRSMNVRLTFDVRGGLTRTIDFGDLLEYEQHLRLGSVVERLHTGMS

SEQ ID NO: 13005 - protein, 500 aa, synthetic construct
MRALVVIRLSRVTDATTSPERQLESCQQLCAQRGWDVVGVAEDLDVSGAVDPFDRKRRPNLARWLAFEEQPFDAIVAYRVDRLTRSIRHLQQLVHWAEDHKKLVASATEAHFDTTTPFAAVVIALMGTVAQMELEAIKERNRSAAHFNIRAGKYRGSLPPWGYLPTRVDGEWRLAPDPVQRERILEVYHRVVDNHEPLHLVAHDLNRRGVLSPKDYFAQLRGREPQGRKWSATALKRSMTSEAMLGYATLNGKTVRDDDGAPLVRAEPILTREQLEALRAELVKTSRAKPAVSTPSLLLRVLFCAVCGEPAYKFTGGGRKHPRYRCRSMGFPKHCGNGTVAMAEWDAFCEEQVLDLLGDAGRLEKVWVAGSDSAAELAEVNAELADLTSLIGSPAYRAGSPQREALDARIAALAARQEELEGLEARPSGWEWRETGQRFGDWWREQDTAAKNTWLRSMNVRLTFDVRGGLTRTIDFGDLQEYEQHLRLGSVVERLHTGMP

SEQ ID NO: 13006 - protein, 500 aa, synthetic construct
MRALIVIRLSRVTDATTSPERQLESCQQLCAQRGWDVVGVAEDLDVSGAVDPFDRKRRPNLARWLAFEEQPFDVIVAYRVDRLARSIRHLQQLVHWAEDHKKLVVSATEAHFDTTTPFAAVVIALMGTVAQMELEAIKERSRSAAHFNIRAGKYRGSLPPWGYLPTRVDGEWRLAPDPVQRERILEVYHRVVDNHEPLHLVARDLNRRGVLSPRDYFAQLQGREPQGRKWSATALKRSMTSEAMLGYATLNGKTVRDDDGAPLVRAEPILTREQREALRAELVKTSRAKPAVSAPSLLLRVLFCAVCGEPAHKFAGGGRKHPRYRCRSMGYPKHCGNGTVAMAEWDAFCEEQVLDLLGDAERLEKVWVVGSDSAVELAEVNAELVDLTSLIGSPAYRAGSPQREALDARIAALAARQEELEGLEARPSGWEWRGTGQRFGDWWREQDTAAKNTWLRSMNVRLTFGVRGGLTRTIDFGDLLEYEQHLRLGSVVERLHTGMS

SEQ ID NO: 13007 - protein, 500 aa, synthetic construct
MRALVVIRLSRVTDATTSPERQLESCQQLCTRRGWDVVGVAEDLDVSGAVDPFDRKRRPNLARWLAFEEQPFDAIVAYRVDRLTRSIRHLQQLVHWAGDHKKLVVSATEAHFDTTTPFAAVVIALMGTVAQMELEAIKERNRSAAHFNIRAGKYRGSLPPWGYLPARVDGEWRLAPDPVQCERILEVYHRVVDNHEPLHSVAHDLNRRGVLSPKDYFAQLQGREPQGRKWSATALKRSMISEAMLGYATLNGKTVRDDDGAPLVRAEPILTREQQEALRAELVKTSRAKPAVSTPSLLLRVLFCAVCGEPAYKFAGGGRRHPRYRCRSMGFLKHCGNGTAAMVEWDAFCEEQVLNLLGDAERLEKVWVAGSDSAVELAEVNAELVDLTSLIGSPAYRAGSPQREALDARVAALAARQEELEGLEARPSGWEWRGTGQRFGDWWREQDTAAKNAWLRSMNVRLTFDVRGGLTRTIDFGDLQEYEQRLRLGSVVERLHTGMS

SEQ ID NO: 13008 - protein, 500 aa, synthetic construct
MRALVVIRLSRVTDATTSPERQLESCQQLCAQRGWDVVGVAEDLDVSGAVDPFDRKRRPNLARWLAFEEQPFDVIVAYRVDRLTRSIRHLQQLVHWAEDHKKLVVSATEAHFDTTTPFAAVVIALMGTVAQMELEAIRERSRSAAHFNIRAGKYRGSLPPWGYLPARVDGEWRLVPDPVQRERILEVYHRVVDDHEPLHLVAHDLNRRGVLSPKDYFAQLRGREPQGRKWSATALKRSMISKAMLGYATLNGKTVRDDDGAPLVRAEPILTREQQEALRAELVKTSRAKPAVSTPSLLLRVLFCAVCGEPAYKFAGGGRKHPRYRCRSMGFPKHCGNGTVAMAEWDTFCEEQVLDLLGDAERLEKVWVAGSDSAVELAEVNAELVDLTSLIGSPAYRAGSPQREALDARIAALAVRQEELEGLEARPSGWEWRETGQRFGDWWREQDTAAKNAWLRSMNVRLTFDVRGGLTRTIDFGDLQEYEQHLRLGSVVERLHTGMS

SEQ ID NO: 13009 - protein, 500 aa, synthetic construct
MRALVVIRLSRVTDATTSPERQLESCQQLCAQRGWDVVGVAEDLDVSGAVDPFDRKRRPNLARWLAFEEQPFDVIVAYRVDRLARSIRHLQQLVHWAEDHKKLVVSATEAHFDTTTPFAAVVIALMGTVAQMELEAIKERSRSAAHFNIRAGKYRGSLPPWGYLPTRVDGEWRLVPDPVQRERILEVYHRVVDNHEPLHLVAHDLNRRGVLSPRDYFAQLRGREPQGRKWSATALKRSMISEAMLGYATLNGETVRDGDGAPLVRTEPILTRGQLEALRAELVKTSRAKPAVSTPSLLLRVLFCAVCGEPAYKFAGGGRKHPRYRCRSMGFPKHCGNGTVAMAEWDAFCEEQVLDLLGDTERLEKVWVAGSDSVVELAEVNAELVDLTSLIGSPAYRAGSPQREALDARIAALAARREELEGLEARPSGWGWRETGQRFGDWWREQDSAAKNSWLRSMNVRLTFDVRGGLTRTIDFGDLQEYEQHLRLGSVVERLHTGRS

SEQ ID NO: 13010 - protein, 500 aa, synthetic construct
MRALVVIRLSRVTDATTSPERQLESCQQLCAQRGWDVVGVAEDLDVSGAVDPFDRKRRPNLARWLAFEERPFDVIVAYRVDRLTRSTRHLQQLVHWAEDHKKLVVSATEAHFDTTTPFAAVVIALMGTVAQMELEAIKERSRSAAHFNIRAGKYRGSLPPWGYLPTRVDGEWRLVPDPVQRERILEVYHRVVDNHEPLHLVAHDLNRRGVLSPKDYFAQLQGREPQGRKWSATALKRSMTSGAMLGYATLNGKTVRDDDGAPLVRAEPILTREQLEALRAELVKTSRAKPAVSTPSLLLRVLFCAVCGEPAYKFAGGGRKHSRYRCRSMGFPRHCGNGTVAMAEWDAFCEEQVLDLLGDAERLEKVWVAGSNSAVELAEVNAELVDLTSLIGSPAYRAGTPQREALDARIAALAARQEELEGLEARPSGWEWRETGQRFGDWWREQDTAAKNTWLRSMNVRLTFDVRGGLTRTIDFGDLQEYEQHLRLGSVVERLHTGMS

SEQ ID NO: 13011 - protein, 500 aa, synthetic construct
MRALVVIRLSRVTDATTSPERQLESCQQLCAQRGWDVVGVAEDLDVSGAVDPFDRKRRPNLARWLAFGEQPFDVIVAYRVDRLARSIRHLQQLVHWAEDHKKLVVSATEAHFDTTTPFAAVVIALMGTVAQMELEAIKERNRSAAHFNIRAGKYRGSLPPWGYLPTRVDGEWRLAPDPVQRERILEVYHRVVVNHEPLHLVAHDLNRHGVLSPRDYFAQLRGREPQGRKWSATALKRSMISEAMLGYATLNGKTVRDDGGAPLVRAEPILTREQLGALRAELVKTPRAKPAVSTPSLLLRVLFCAVCGEPAYKFAGGGRKHPRYRCRSMGFPKHCGNGTVAMAEWDAFCEEQVLNLLGDAERLEKVWVAGSDSAVELAEVNAELVDLTSLIGSPAYRAGSPQREALDARIAVLAARQEELEGLEARPSGWEWRETGQRFGDWWREQDTAAKNTWLRSMNVRLTFDVRGGLTRTIDFGDLQEYEQHLRLGSVVGRLHTGMS

SEQ ID NO: 13012 - protein, 500 aa, synthetic construct
MRALVVIRLSRVTDATTSPERQLESCQQLCAQRGWDVVGVAEDLDVSGAVDPFDRKRRPNLARWLASEEQPFDVIVAYRVDRLTRSTRHLQQLVHWAEDHKKLVVSATEAHFDTTTPFAAVVIALMGTVAQMELEAIKERSRSAAHFNIRAGKYRGSLPPWGYLPTRVDGEWRLVPDPVQRERILEVYHRVVDNHEPLHLVAHDLNRRGVLSPKDYFAQLRGREPQGRKWSATALKRSMISEAMLGYATLGGKTVRDDDGAPLVRAEPILTREQLGALRAELVKTSRAKPAVSTPSLLLRVLFCAVCGEPAYKFAGGGRKHPRYRCRSMGFPKHCGNGTVAMAEWDAFCEDQVLDLLGDAERLEKVWVAGSDSAVELAEVIAELVDLTSLIGSPAYRAGSPQREALDARIAALAARQEELEGLETRPSGWEWRETGQRFGDWWREQDTAAKNTWLRSMNVRLTFDVRGGLTRTIDFGDLQEYEQHLRLGSVVERLHTGMS

SEQ ID NO: 13013 - protein, 500 aa, synthetic construct
MRALVVIRLSRVTDATTSPERQLESCQQLCAQRGWDVVGVAEDLDVSGAVDPFDRKRRPSLARWLAFEEQPFDAIVAYRVDRLARSIRHLQQLVHWAEDHKKLVVSATEAHFDTTTPFAAVVIALMGTVAQMELEAIKERNRSAAHFNIRAGKYRGSLPPWGYLPTRVDGEWRLAPDPVQRERILEVYHRVVDNHEPLHLVAHDLNRRGVLSPKDYFAQLRGREPQGRKWSATALKRSMTSEAMLGYATLNGKAVRNDDGAPLVRAEPILTREQLEALRAELAKTSRAKPAVSTPSLLLRVLFCAVCGEPAYKFSGGGRKHPRYRCRSMGFPKHCGNGTVAMVEWDAFCEEQVLDLLGDAERLEKVWVAGSDSAVELAEVNAELVDLTSLIGSPAYRAGSPQREALDARIAALAARQEELEGLEARPSGWEWRETGQRFGDWWRGQDTAAKNTWLRSMNVRLTFDVRGGLTRTIDFGDLQEYEQHLRSGSVVERLYTGTS

SEQ ID NO: 13014 - protein, 500 aa, synthetic construct
MRALVVIRLSRVTDATTSPERQLESCQQLCAQRGWDVVGVAEDLDVSGAVDPFDRKRRPNLARWLAFEEQPFDVIVAYRVDRLARSIRHLQQLVHWAEDHKKLVVSATEAHFDTTTPFAAVVIALMGTVAQMELEAIKERNRSAAHFNIRAGKYRGSLPPWGYLPARVDGEWRLVPDPVQRERILEVYHRVVDNHEPLHLVAHDLNRRGVLSPKDYFAQLRGREPQGRKWSATALKRSMTSEAMLGYATLNGKTVRDDDGTPLVRAEPILTREQLEALRAELVKTSRAKPAVSTPSLLLRVLFCAVCGEPAYKFAGGGRKHPRYRCRSMGFPKHCGNGTVAMAEWDAFCEKQVLDLLGDAERLEKVWVAGSDSAVELAEVNAELVDLMSLIGSPVYRAGSPQREALDARIAALAARQEELEGLEARPSGWEWRGTGQRFGDWWREQDTAAKNTWLRSMNVRLPFDVRGGLTRTIDFGDLHEYEQHLRLGSVVERLHTGMS

SEQ ID NO: 13015 - protein, 500 aa, synthetic construct
MRALVVIRLSRVTDATTSPERQLESCKQLCAQRGWDVVGVAEDLDVSGAVDPFDRKRRPNLARWLAFEERPFDVIVAYRVDRLTRSTRHLQQLVHWAEDHKKLVVSATEAHFDTTTPFAAVVIALMGTVAQMELEAIKERSRSAAHFNIRTGKYRGSLPPWGYLPTRVDGEWRLEPDPVQRERILEVYHRVVDNHEPLHLVAHDLNRRGVLSPRDYFAQLRGREPQGRKWSATALKRSMTSEAMLGYATLNGKTVRGDDGAPLARAEPILTREQLEALRAELVKTSRARPAVSTPSLLLRVLFCAVCGEPAYKFAGGGRKHPRYRCRSMGFPKHCGNGTVAMAEWDAFCEEQVLDLLGDTERLEKVWVAGSDSAVELAEVNAELVDLTSLIGSPAYRAGSPQREALDARIAALAARQEELEGLETRPSGWEWRETGQRFGDWWREQDTAARNTWLRSMNVRLTFDVRGGLTRTIDFGDLQEYEQYLRLGSVVERLRTGMS

SEQ ID NO: 13016 - protein, 500 aa, synthetic construct
MRALVVIRLSRVTDATTSPERQLESCQQLCAQRGWDVVGVAEDLDVSGAVDPFDRKRRPNLARWLAFEGQPFDVIVAYRVDRLARSIRHLQQLVHWAEDHKKLVVSATEAHFDTTTPFAAVVIALMGTVAQMELEAIKERSRSAAHFNIRAGKYRGSLPPWGYLPTRVDGEWRLAPDPVQRERILEVYHRVVDNHEPLHLVAHDLNRRGVLSPKDYFAQLRGREPQGRKWSATALKRSMVSEAMLGYATLNGKTVRDDDGAPLVRAEPILTREQLEALRAELVKTSRAKPAVSTPSLLLRVLFCAVCGEPAYKFAGGGRKHPRYRCRSMGFPKHCGNGTVAMAEWDAFCEEQVLNLLGDAERLEKVWVAGSDSAVELAEVNAELVDLTSLIGSPAYRAGSTQREALDARIAALAARQEELEGLEARPSGWEWRETGQRFGDWWREQDTAAKNTWLRSMNVRLTFDVRGGLTRTIDFGDLQEYEQHLRLGSVVERLHIGMS

SEQ ID NO: 13017 - protein, 500 aa, synthetic construct
MRALVVIRLSRVTDTTTSPERQLESCQQLCAQRGWDVVGVAEDLDVSGAVDPFDRKRRPNLARWLAFEEQPFDVIVAYRVDRLARSIRHLQQLVHWAEDHKKLVVSATEAHFDTTTPFAAVVIALMGTVAQMELEAIKERSRSAAHFNIRAGKYRGSLPPWGYLPTRVDGEWRLAPDPVQRERILEVYHRVVDNHEPLHLVAHDLNRRGVLSPKDYFAQLQGREPQDRKWSATALKRSMISEAMLGYVTLNGKIVRDDDGAPLVRAEPILTREQLEALRAELVKTSRAKPAVSTPSLLLRVLFCAVCGEPAYKFAGGGRKHPRYRCRSMGFPKHCGNGTVAMAEWDAFCEEQVLGLLGDAERLEKVWVAGSDSAVELAEVNAELADLTSLIGSPAYRAGSPQREALDARIAALAARQEELEGLEARPSGWEWRETGQRFRDWWREQDTAAKNTWLRSMNVRLTFDVRGGLTRTIDLGDLQEYEQHLRLGSVVERLHTGMS

SEQ ID NO: 13018 - protein, 500 aa, synthetic construct
MRALVVIRLSRVTDATTSPERQLESCQQLCAQRGWDVVGVAEDLDVSGAADPFDRKRRPNLARWLAFEEQPFDVIVAYRVDRLARSIRHLQQLVHWAEDHKKLVVSATEAHFDTTTPFAAVVIALMGTVAQMELEAIKERSRSAAHFNIRAGKYRGSLPPWGYLPARVDGEWRLVPDPVQRERILEVYHRVVDNHEPLHLVAHDLNRRGVLSPRDYFAQLRGRGPQGRKWSATALKRSMISEAMLGYATLNGKTVRDDDGAPLVRAEPILAREQLEALRAELVKTSRAKPAVSAPSLLLRVLFCAVCGEPAYKFAGGGRKHPRYRCRSMGFPKHCGNGTVAMAEWDAFCEEQVLDLLGDAERLEKVWVAGSDSAVELAEVNAELVDLTSLIGSPAYRADSPQREALDARIAALAARQEELEGLEARPSGWEWRETGQRFGDWWREQDTAAKNTWLRSMNVRLTFDVRGGLTRTIDFGDLQEYEQHLRLGSVVERLHAGMS

SEQ ID NO: 13019 - protein, 500 aa, synthetic construct
MRALVVIRLSRVTDATTSPERQLESCQQLCAQRGWDVVGVAEDLDVSGAVDPFDRKRRPNLARWLAFEEQPFDAIVAYRVDRLTRSIRHLQQLVHWAEDHKKLVVSATEAHFDTTTPFAAVVIALMGTVAQMELEAIKERNRSAAHFNIRAGKYRGSLPPWGYLPTRVDGEWRLVPDPVQRERILEVYRRVVDNHEPLHLVAHDLNRRGVLSPRDYFAQLQGREPQGRKWSATALKRSMISEAMLGHATLNGKIVRDDDGAPLVRAEPILTREQLEALRAELVKTSRAKPAVSTPSLLLRVLFCAVCGEPAYKFAGGGRKHPRYRCRSMGFPKHCGNGTVAMAEWDAFCEEQVLDLLGDAERLEKVWVAGSDSAVELAEVNAELVDLMSLIGSPAYRAGSPQREALDARIAALAARQEELEGLEARPSGWEWRETGQRFRDWWRVQDTAAKNTWLRSMNVRLTFDVRGGLTRTIDFGDLQEYEQHLRLGSVVERLHTGMS

SEQ ID NO: 13020 - protein, 500 aa, synthetic construct
MRALVVIRLSRVTDATTSPERQLESCQQLCAQRGWDVVGVAEDLDVSGAVDPFDRKRRPNLARWLAFEEQPFDVIVAYRVDRLTRSVRHLQQLVHWAEDHKKLVVSATEAHFDTTTPFAAVVIALMGTVAQMELEAIKERSRSAAHFNIRAGKYRGSLPPWGYLPTRVDGEWRLVPDPVQRERILEVYHRVVDNHEPLHLVAHDLNRRGVLSPKDYFAQLRGREPQGRKWSATALKRSMISEAMLGYATLNGKTVRGDDGAPLVRAEPILTREQLEALRAELVKTSRAKPAVSTPSLLLRVLFCAVCGEPAYKFAGGGRKHPRYRCRSMGFPKHCGNGTLAMAEWDAFCEEQVLNLLGDAERLEKVWVAGSDSAVKLAEVNAELVDLTSLIGSPAYRAGSPQREALDARIAALAARQEELEGLEARPSGWEWRETGQRFGDWWREQDTAAKNTWLRSMNVRLTFDVRGGLTRTIDFGDLQEYEQHLRLGSVVERLHTGMS

SEQ ID NO: 13021 - protein, 500 aa, synthetic construct
MRALVVIRLSRVTEATTSPERQLESCQQLCAQRDWDVAGVAEDLDVSGAVDPFDRKRRPNLARWLAFEEQPFDVIVAYRVDRLSRSIRHLQQLVHWAEDHKKLVVSATEAHFDTTTPFAAVVIALMGTVAQMELEAIKERSRSAAHFNIRAGKYRGSLPPWGYLPTRVDGEWRLAPDPVQRERILEVYRRVVDNHEPLHLVAHDLNRRGVLSPRDYFAQLRGREPQGRKWSATALKRSMTSEAMLGYATLNGKTVRDDDGAPLVRAEPILTREQLEALRAELVKTSRAKPAVSTPSLLLRVLFCAVCGEPAYKFAGGGRKHPRYRCRSMGFPKHCGNGTVAMAEWDALCEEQVLDLLGDAERLEKVWVAGSDSAVELAEVNAELVDLTSLIGSPAYRAGSPQREALDARIAALAARQEELEGLEARPSGWEWRETGQRFGDWWREQDTAAKNTWLRSMNVRLTFDVRGGLTRTIDFGDLQEYEQHLRLGSVAERLHTGMS

SEQ ID NO: 13022 - protein, 500 aa, synthetic construct
MRALVVIRLSRVTDATTSPERQLESCQQLCAQRGWDVVGVAEDLDVSGAVDPFDRKRRPNLARWLAFEEQPFDVIVAYRVDRLTRSTRHLQQLVRWAEDHKKLVVSATEAHFDTTTPFAAVVIALMGTVAQMELEAIKERNRSAAHFNIRAGKYRGSLPPWGYLPTRVNGEWRLVPDPVQRERILEVYHRVVDKHEPLHLVAHDLNRRGVLSPKDYFAQLRGREPQGRKWSATALKRSMTSEAMLGYATLNGKTVRDDDGAPLVRAEPILTRKQLEALRAELVKTSRAKPAVSTPSLLLRVLFCAVCGEPAYKFAGGGRKHPRYRCRSMGFPKHCGNGTVAMAEWDAFCEEQVLNLLGDAERLEKVWVAGSDSAVELAEVNTELVDLTSSIGSPAYRAGSPQREALDARIAALAARQEELEGLEAHPSGWEWRETGQRFGDWWREQDTAAKNTWLRSMNVRLTFDVRGGLTRTIDFGDLQEYEQLLRLGSVVERLHTGMS

SEQ ID NO: 13023 - protein, 500 aa, synthetic construct
MRVLVVIRLSRVTEATTSPERQLESCQQLCAQRGWDVVGVAEDLDVSGAVDPFDRKRRPNLARWLAFEEQPFDVIVAYRVDRLARSIRHLQQLVHWAEDHKKLVVSATEAHFDTTTPFAAVVIALMGTVAQMELEAIKERNRSAAHFNIRAGKYRGSLPPWGYLPTRVNGEWRLVPDPVQRERILEVYHRVVDNHEPLHLVAHDLNRRGVLSPKDYFAQLQGREPQGRKWSATALKRSMISEAMLGYATLNGKTVRDDDGAPLVRAEPILTREQQEALRAELAKTSRAKPAVSTPSLLLRVLFCAVCGEPAYKFAGGGRKHPRYRCRSMGFPKHCGNGTVAMAEWDAFCEEQVLDLLGDAERLEKVWVVGSDSAVELAEVNAELVDLTSLIGSPAYRAGSPQREALDARIAALAARQEELEGLEARPSGWEWRETGQRFGDWWREQDTAAKNTWLRSMNVRLTFDVRGGLTRTIDFGDLHEYEQHLRLGSAVERLHTGMS

SEQ ID NO: 13024 - protein, 500 aa, synthetic construct
MRALVVIRLSRVTDATTSPERQLESCQQLCAQRGWDVVGVAEDLDVSGAVDPFDRKRRPNLARWLAFEEQPFDVIVAYRVDRLTRSTRRLQQLVHWAEDHKKLVVSATEAHFDTTTPFAAVVIALMGTVAQMELEAIKERSRSAAHFNIRAGKYRGSLPPWGYLPTRVDGEWRLAPDPVQRERILEVYHRVVDNHEPLHLVAHDLNRRGVLSPKDYFAQLRGREPQGRKWSATALKRSMTSEAMLGYATLYGKTVRGDDGAPLVRAEPILTREQLEALRAELVKTSRAKPAVSTPSLLLRVLFCAVCGEPAYKFAGGGRKHPRYRCRSMGFPKHCGNGTVAMVEWDAFCEEQVLDLLGDTERLEKVWVAGSDSAVELAEVSAELVDLTSLIGSPAYRAGSPQREALDARIAALAARQAELEGLEARPSGWEWRGTGQRFGDWWREQDTVAKNTWLRSMDVRLTFDVRGGLTRTIDFGDLQKYEQHLRLGSVVERLHTGMS

SEQ ID NO: 13025 - protein, 500 aa, synthetic construct
MRALVVIRLSRVTDATTSPERQLESCQQLCAQRGWDVVGVAEDLDVSGAVDPFDRKRRPNLARWLAFAEQPFDVIVAYRVDRLTRSVRHLQQLVHWAEDHEKLVVSATEAHFDTTTPFAAVVIALMGTVAQMELEAIKERNRSAAHFNIRAGKYRGSLPPWGYLPARVDGEWRLVPDPVQRERILEVYHRVVNNHEPLHLVAHDLNRRGVLSPRDYFAQLQGREPQGRKWSATALKRSMISEAMLGYATLNGKTVRDNDGAPLVRAEPILTREQREALRAELVKTSRAKPAVSTPSLLLRVLFCAVCGEPAYRFAGGGRKHSRYRCRSMGFPKHCGNGTVAMAEWDAFCEEQVLDLLGDAERLEKVWVAGSDSAVELAEVNAELVDLTSLIGSPTYRAGSPQREALDARIAALAARQEELEGLEARPSGWEWRGTGQRFGDWWREQDTAAKNTWLRSMNVRLTFDVRGGRTRTIDLGDLQEYERHLRLGSVVERLHTGMS

SEQ ID NO: 13026 - protein, 500 aa, synthetic construct
MRALVVIRLSRVTDTTTSPERQLESCQQLCAQRGWDVVGVAEDLDVSGAVDPFDRKRRPNLARWLAFGEQPFDVIVAYRVDRLARSIRHLQQLVHWAEDHKKLVVSATEAHFDTTTPFAAVVIALMGTVAQMELEAIKERSRSAAHFNIRAGKYRGSLPPWGYLPTRVDGEWRLVPDPVQRERILEVYHRVVDNHEPLHLVAHDLNRRGVLSPKDYFAQLRGREPQGRKWSATALKRSMISEAMLGYATLNGKIVRDDDGAPLVRAEPILTREQQEALRAELVKTSRAKPVVSTPSLLLRVLFCAVCGEPAYKFTGGGRKHPRYRCRSMGFPKHCGNGTVAMAEWDVFCEEQVLDLLGDAERLEKVWVAGSDSAVELAEVNAELVDLTSLIGSPAYRAGSPQREALDARIAALAARQEELEGLEARPSGWEWRETGQRFGDWWREQDTAAKNTWLRSMNVRLTFDVRGGLTRTIDFGDLQEYEQHLRLGSVVERLHTGMS

SEQ ID NO: 13027 - protein, 500 aa, synthetic construct
MRALVVIRLSRVTDATTSPERQLESCQQLCTQRGWDVVGVAEDLDVSGAVNPFDRKRRPNLARWLAFEEQPFDVIVAYRVDRLTRSTRHLQQLVHWAEDHKKLVVSATEAHFDTTTPFAAVVIALMGTVAQMELEAIKERNRSAAHFNIRAGKYRGSLPPWGYLPTRVDGEWRLAPDPVQRERILEVYHRVVDNHEPLHLVAHDLNRRGVLPPKDYFAQLRGREPQGRKWSATALKRSMISEAMLGYATLNGKTVRDDNGAPLVRAEPILTREQQEALRAELVKTSRTKPAVSTPSLLLRVLFCAVCGEPAYKFSGGGRKHPRYRCRSMGYPKHCGNGTVAMAEWDAFCEEQVLDLLGDAERLEKVWVAGSDSAVELAEVNAELVDLTSLIGSPAYRAGSPQREALDARIAALAARQEELGGLEARPSGWEWRKTGQRFGDWWREQDTAAKNTWLRSMNVRLTFDVRSGLTRTIDFGDLQEYEQHLRLGSVVERSHTGMS

SEQ ID NO: 13028 - protein, 500 aa, synthetic construct
MRALVVIRLSRVTDATTSPERQLESCQQLCAQRGWDVVGVAEDLDVSGAVDPFDRKRRPNLARWLAFEEQPFDVIVAYRVDRLTRSVRHLQQLVHWAEDHKKLVVSATEAHFDTTTPFAAVVIALMGTVAQMELEAIKERNRSAAHFNIRAGKYRGSLPPWGYLPARVDGEWRLVPDPVQRERILEVYHRVVDDHEPLHLVAHDLNRRGVLSPKDYFAQLRGREPQGRKWSATALKRSIISEAMLGYATLDGKTVRDDDGAPLVRAEPILTREQLEALRAELVKTSRAKPAVSTPSLLLRVLFCAVCGEPAYKFSGGGRKHPRYRCRSMGFPKHCGNGTVAMAEWDAFCEEQVLDLLGDAERLEKVWVAGSDSTVELAEVNAELVDLTSLIGSPAYRAGSPQREALDARIAALAARQEELGGLEARPSGWEWCGTGQRFGDWWREQDTAARNTWLRSMNVRLTFDVRGGLTRTIDFGDLQEYEQHLRLGSVVERLHTGMS

SEQ ID NO: 13029 - protein, 500 aa, synthetic construct
MRALVVIRLSRVTEATTSPERQLESCQQLCAQRGWDVVGVAEDLDVSGAVDPFDRKRRPNLARWLAFEEQPFDVIVAYRVDRLARSIRHLQQLVHWAEDHKKLVVSATEAHFDTTTPFAAVVIALMGTVAQMELEAIKERNRSAAHFNIRAGKYRGSLPPWGYLPTRVNGEWRLVPDPVQRERILEVYHRVVDNHEPLHLVAHDLNRRGVLSPKDYFAQLQGREPQGRKWSATALKRSMTSEAMLGYATLNGKTVRDDDGAPLVRAEPILTREQREALRAELAKTSRAKPAVSTPSLLLRVLFCAVCGEPAYKFAGGGRKHPRYRCRSMGFPKHCGNGTVAMAEWDAFCEGQVLNLLGDAERLEKVWVAGSDSAVELAEVNAELVDLTSLIGSPAYRAGSPQREALDARIAALAARQEELEGLEARPSGWEWRETGQRFGDWWREQDTAAKNTWLRSMNVRLTFDVRGGLTRTIDFGDLQEYEQHLRLGSVVERLHTGMS

SEQ ID NO: 13030 - protein, 500 aa, synthetic construct
MRALVVIRLSRVTDATTSPERQRESCQQLCAQRGWDVVGVAEDLDVSGAVDPFNRKRRPNLARWLAFEEQPFDVIVAYRVDRLARSIRHLQQLVHWAEDHEKLVVSATEAHFDTTTPFAAVVIALMGTVAQMELEAIKERSRSAAHFNIRAGKYRGSLPPWGYLPTRVDGEWRLVPDPVQRERILEVYHRVVDNHEPLHLVAHDLNRRGVLSPRDYFAQLQGREPQGRKWSATALKRSMISVAMLGYATLNGKTVRDDDGAPLVRAEPILTREQLEALRAELVKTSRAKPAVSTPSLLLRVLFCAVCGEPAYKFAGGGRKHPRYRCRSMGFPKHCGNGTVAMAEWDAFCEEQVLGLLGDAERLEKVWVAGSDSAVELAEVNAELVDLTSLIGSPAYRAGSPQREALDARIATLAARQEELEGIEARPSGWKWRETGQRFGDWWREQDTAAKNTWLRSMNVRLTFDVRGGLTRTIDFGDLQEYEQHLRLGSVVERLHTGMP

SEQ ID NO: 13031 - protein, 500 aa, synthetic construct
MRALVVIRLSRVTDATTSPERQLESCQQLCAQRGWDVVGVAEDLDVSGAVDPFDRKRRPNLARWLAFEEQPFDAIVAYRVDRLTRSIRHLQQLVHWAEDHKKLVVSATEAHFDTTTPFAAVVIALMGTVAQMELEAIKERNRSAAHFNIRAGKYRGSLPPWGYLPARVDGEWRLVPDPVQRERILEVYHRVVDNHEPLHLVAHDLNRRGVLSPKDYFAQLQGREPQGRKWSATALKRSMISVAMLGYATLNGKTVRDDDGAPLVRAEPILTREQLEALRAELVKTSRAKPAVSTPSLLLRVLFCAVCGEPAYKFAGGGRKHPRYRCRSMGFPKHCGNGTVAMAEWDAFCEEQVLDLLGDAERLEKVWVAGSDSAVKLAEVNAELVDLTSLIGSPAYRAGSPQREALDARIAALVARQEELEGLEARPSGWEWRETGQRFGDWWREQDTAAKNTWLRSMNVRLTFDVRGGLARTIDFGDLQEYEQHLRLGSVVERLHTGMS

SEQ ID NO: 13032 - protein, 500 aa, synthetic construct
MRALIVIRLSRVTDATTSPERQLESCQQLCAQRGWDVVGVAEDLDVSGAVDPFDRKRRPNLARWLAFEEQPFNVIVAYRVDRLARSIRHLQQLVHWAEDHKKLVVSATEAHFDTTTPFAAVVIALMGTVAQMELEAIKERNRSAAHFNIRAGKYRGSLPPWGYLPTRVDGEWRLVPDPVQRERILEVYHRVVDNHEPLHLVAHDLNRRGDLSPKDYFAQLQGREPQGRKWSATALKRSMISGAMLGYATLNGKTVRDDDGAPLVRAEPILTREQQEALRAELVKTSRAKPAVSTPSLLLRVLFCAVCGEPAYKFAGGGRKHPRYRCRSMGFPKHCGNGTVAMAEWDAFCEEQVLGLLGDAERLEKVWVAGSDSAVEIAEVNKELVDLTSLIGSPAYRAGSPQREALDARIAALAARQEELEGLEARPSGWEWRGTGQRFGDWWREQDTAAKNTWLRSMNVRLTFDVRGGLTRTIDFGDLQEYGQHLRLGSVVERLHTGMS

SEQ ID NO: 13033 - protein, 500 aa, synthetic construct
MRALVVIRLSRVTDATTSPERQLESCQQLCAQRGWDVVGVAEDLDVSGAVDPFDHKRRPNLARWLAFEEQPFDAIVAYRVDRLTRSIRHLQQLVHWAEDHRKLVVSATEAHFDTTTPFAAVVIALMGTVAQMELEAIKERSRSAAHFNIRAGKYRGSLPPWGYLPTRVNGEWRLVPDPVQRERILEVYHRVVDNHEPLHLVAHDLNRRGVLSPRDYFAQLRGREPQGRKWSATALKRSMISEAMLGYATLNGKTVRDDDGAPLVRAEPILTREQLEALRAELVKTSRAKPAVSTPSLLLRVLFCAVCGEPAYKFAGGGRKHPRYRCRSMGFPKHCGNGTVAMAEWDAFCEEQVLDLLGDAERLERVWVAGSDSAVELAEVNAELVDLTSLIGSPAYRAGSPQREALDTRIAALAARQEELGSLEARPTGWEWRETGQRFGDWWREQDTAAKNTWLRSMNVRLTFDVRGGLTRTIDFGDLQEYEQHLRLGSAVERLHTGMS

SEQ ID NO: 13034 - protein, 500 aa, synthetic construct
MRALVVIRLSRVTDATTSPERQLESCQQLCAQRGWDVVGVAEDLDVSGAVDPFDRKRRPNLARWLAFEERPFDVIVAYRVDRLTRSIRHLQQLVHWAEDHKKLVVSATEAHFDTTTPFAAVVIALMGTVAQMELEAIKERNRSAAHFNIRAGKYRGSLPPWGYLPTRVDGVWRLVPDPVQRERILEVYHRVVDNHEPLHLVAHDLNRRGVLSPKDYFAQLRGREPQGRKWSATALKRSMISVAMLGYAILNGKTVRDDDGAPLVRAEPILTREQLEALRAELVKTSRAKPAVSTPSLLLRVLFCAVCGEPAYKFSGGGRKHPRYRCRSMGFPKHCGNGTVAMAEWDAFCEEQVLDLLGDAERLEKVWVAGSDSAVELAEVNAELMDLTSLIGSPAYRAGSPQREALDARIAALAARQEELEGLEARPSGWEWRETGQRFGDWWREQDTAAKNTWLRSMNVRLTFDVRGGLTRTIDFGDLQEYEQHLRLGSVVERLHTGMS

SEQ ID NO: 13035 - protein, 500 aa, synthetic construct
MRALVVIRLSRVTDATTSPERQLESCQQLCAQRGWDVVGVAEDLDVSGAVDPFDRKRRPNLARWLAFEEQPFDVIVAYRVDRLTRSIRHLQQLVHWAEDHKKLVVSATEAHFDTTTPFAAVVIALMGTVAQMELEAIRERSRSAAHFNIRAGKYRGSLPPWGYLPTRVDGEWRLAPDPVQRERILEVYHRVVDNHEPLHLVAHDLNRRGVLSPKDYFAQLRGREPQGRKWSATALKRSMISVAMLGYATLNGKTVRNDDGAPLVRAEPILTREQLEALRAELVRTSRAKPAVSTPSLLLRVLFCAVCGEPAYKFAGGGRKHPRYRCRSMGFPKHCGNGTVAMAEWDAFCEEQVLDLLGDAERLEKVWVAGSDSAVELAEVNAELVDLTSLIGSPAYRAGSPQREALDARIAALAARQEELEGLEARPSGWEWRETGQRFGDWWRGQDTAAKNTWLRSMNVRLTFDVRGGLTRTIDFGDLQEYEQHLRLGSVVERLHTEMS

SEQ ID NO: 13036 - protein, 500 aa, synthetic construct
MRALVVIRLSRVTDATTSPERQLESCQLLCAQRGWNVVGVAEDLDVSGAVDPFDHKRRPNLARWLAFEEQPFDVIVAYRVDRLTRSTRHLQQLVHWAEDHKKLVVSATEAHFDTTTPFAAVVIALMGTVAQMELEAIKERSRSAAHFNIRAGKYRGSLPPWGYLPTRVDGEWRLVPDPVQRERILEVYRRVVDNHEPLHLVAHDLNRRGVLSPKDYFAQLRGREPQGRKWSATALKRSMISEAMLGYATLNGKTVRDEDGAPLVRAEPILTREQLEALRAELVKTSRAKPAVSTPSLLLRVLFCAVCGEPAYKFAGGGRKHPRYRCRSMGFPKHCGNGTVAMAEWDAFCEEQVLDLLGDAERLEKVWVAGSDSAVELAEVNAELADLTSLIGSPAYRAGSPQREALDARIAALAARQEELEGLEARPSGWEWRETGQRFGDWWREQDTAAKNTWLRSMKVRLTFDVRGGLTRTIDFGDLQEYEQHLRLGSVVERLHTGMS

SEQ ID NO: 13037 - protein, 500 aa, synthetic construct
MRALVVIRLSRVTDATTSPERQLESCQQLCAQRGWDVVGVAEDLDVSGAVDPFDRKRRPNLARWLAFEEQPFDVIVAYRVDRLTRSVRHLQQLVHWAEDHKKLVVSATEAHFDTTTPFAAVVIALMGTVAQMELEAIKERSRSAAHFNIRAGKYRGSLPPWGYLPTRVDGEWRLVPDPVQRERILEVYHRVVVNHEPLHLVAHDLNRRGVLSPKDYFAQLQGREPQGRKWSATALKRSMISGAMLGYATLNGKTVRDDDGAPLVRAEPILTREQQEALRAELVKTSRAKPAVSTPSLLLRVLFCAVCGEPAYKFAGGGRKHPRYRCRSMGFPKHCGNGTVAMAEWDVFCEEQVLDLLGDAERLEKVWVAGSDSAVKLAEVNAELVDLTSLIGSPAYRAGSPQREALDARIAALVARQEELEGLEARPPGWEWRETGQRFGDWWRGQDTAAKNTWLRSMNVRLTFDVRGGLTRTIDFGDLQEYEQHLRLGSVVERLHTGMS

SEQ ID NO: 13038 - protein, 500 aa, synthetic construct
MRALVVIRLSRVTDATTSPERQRESCQQLCAQRGWDVVGVAEDLDVSGTVDPFDRKRRPNLARWLAFEEQPFDVIVAYRVDRLTRSIRHLQQLVHWAEDHKKLVVSATEAHFDTTTPFAAVVIALMGTVAQMELEAIRERSRSAAHFNIRAGKYRGSLPPWGYLPTRVDGEWRLVPDPVQRERILEVYHRVVDNHEPLHLVAHDLNRRGVLSPKDYFAQLRGREPQGRKWSATALKRSMTSEAMLGYATLNGKTVRDDDGAPLVRAEPILTREQLEALRAELVKTSRAKPAVSTPSLLLRVLFCAVCGEPAYKFAGGGRKHPRYRCRSMGFPKHCGNGTVAMAEWDAFCEEQVLDLFGDAERPEKVWVAGSDSAVELAEVNAELVDLTSLIGSPAYRTGSPQREALDARIAALAARQEELEGLEARPSGWEWRETGQRFGDWWREQDTAAKNAWLRSMNVRLTFDVRGGLTRTIDFGDLQEYEQHLRLGSVVERLHTGMS

SEQ ID NO: 13039 - protein, 500 aa, synthetic construct
MRALVVIRLSRVTDATTSPERQLESCQQLCAQRGWDVVGVAEDLDVSGAVDPFDRKRRPNLACWLAFEEQPFDVIVAYRVDRLTRSIRHLQQLVHWAEDHKKLVVSATEAHFDTTTPFAAVTIALMGTVAQMELEAIKERSRSAAHFNIRAGKYRGSLPPWGYLPTRVDGEWRLAPDPVQRERILEVYHRVVDDHEPLHSVAHDLNRRGDLSPRDYFAQLQGREPRGRKWSATALKRSMISEAMLGYVTMNGKTVRDDDGAPLVRAEPILTREQLEALRAELVKTSRAKPAVSTPSLLLRVLFCAVCGEPAYKFAGGGRKHPRYRCRSMGFPKHCGNGTVAMAEWDAFCEEQVLDLLGDAERLEKVWVAGSDSAAELAEVNAELVDLTSLIGSPAYRAGSPQREALDARIAALAARQEELEGLEARPSGWEWRETGQRFGDWWREQDTAAKNTWLRSMNVRLTFDVRGGPTRTIDFGDLQEYEQHLRLGSTVERLHTGMS

SEQ ID NO: 13040 - protein, 500 aa, synthetic construct
MRALVVIRLSRVTDATTSPERQLESCQQLCAQRGWDVVGVAEDLDVSGAVDPFDHKRRPNLARWLAFEEQPFDVIVAYRVDRLARSIRHLQQLVHWAEDHKKLVVSATEAHFDTTTPFAAVVIALMGTVAQMELEAIKERSRSAAHFNIRAGKYRGSLPPWGYLPTRVDGEWRLAPDPVQRERILEVYHRVVDNHEPLHLVAHDLNRRGVLSPKDYFAQLQGREPQGRKWSATALKRSMISEAMLGYATLNGKTVRDDDGAPLVRAEPILTREQLGALRAELVKTSRAKPAVSTPSLLLRVLFCAVCGEPAYKFSGGGRKHPRYRCRSMGFPKHCGNGTVAMAEWDAFCEEQVLGLLGDAERLEKVWVAGSDSAVELAEVNAELVDLTSLIGSPAYRAGSPQREALDARIAALAARQEELEGLEARPSGWEWRETGQRFGDWWREQDTTAKNTWLRSMNVRLTFDVRGGLTRTIDFGDLQEYEQHLRLGSVVDRLHTGMS

SEQ ID NO: 13041 - protein, 500 aa, synthetic construct
MRALVVIRLSRVTDATTSPERQLESCQQLCAQRGWDVVGVAEDLDVSGAVDPFDRKRRPNLARWLAFEEQPFDVIVAYRVDRLTRSARHLQQLVHWAEDHKKLVVSATEAHFDTTTPFAAVVIALMGTVAQMELEAIKERSRSAAHFNIRAGKYRGSLPPWGYLPTRVDGEWRLVPDPAQRGRILEVYHRVVDNHEPLHLVAHDLNRRGVLSPRDYFAQLQGREPQGRKWSATALKRSMTSEAMLGYATLNGKTVRDDDGAPLVRAEPILTREQQEALRAELDKTSRAKPAVSTPSLLLRVLFCAVCGEPAYKFAGGGRRHPRYRCRSMGFPKHCGNGTVAMAEWDAFCEEQVLDLLGDAERLEKVWVAGSDSAVELAEVNAELVDLTSLIGSPAYRAGSPQREALDARIAALAARQEELEGLEARLSGWEWRGTGQRFGDWWREQDTAAKNTWLRSMNIRLTFDVRGRLTRTIDLGDLQEYEQHLRLGSAVERLHTGMS

SEQ ID NO: 13042 - protein, 500 aa, synthetic construct
MRALVVIRLSRVTDATTSPERQLGSCQQLCAQRGWDVVGVAEDLDVSGAVDPFDRKRRPNLARWLAFEEQPFDVIVAYRVDRLARSIRHLQQLVHWAEDHKKLVVSATEAHFDTTTPFAAVVIALMGTVAQMELEAIKERSRSAAHFNIRAGKYRGSLPPWGYLPSRVDGEWRLVPDPVQRERILEVYHRVVDNHEPLHLVALDLNRRGVLSPKDYFAQLQGREPQGRKWSATALKRSMISEVMLGYATLNGKTVRDDDGAPLVRAEPILTREQLEALRAELVKTSRAKPAVSTPSLLLRVLFCAVCGEPAYKFAGGGRKHLRYRCRSMGFPKHCGNGTVAMAEWDTFCEEQVLDLLGDAERLEKVWVAGSDSAVELAEVNAELVDLTSLIGSPAYRAGSPQREALDARIAALAARQEELGGLEARPSGWEWRETGQRFGDWWRKQDTVAKNTWLRSMNVRLTFDVRGGLTRTIDFGDLQEYEQHLRLGSVVERLHTGMS

SEQ ID NO: 13043 - protein, 500 aa, synthetic construct
MRALVVIRLSRVTDATTSPERQLESCQQLCAQRGWDVVGVAEDLDVSGAVDPFDRKRRPNLARWLAFEEQPFDAIVAYRVDRLARSIRHLQQLVHWAEDHKKLVVSATEAHFDTTTPFAAVVIALMGTVAQMELEAIKERSRSATHFNIRAGKYRGSLPPWGYLPARVDGEWRLVPDPVQRERILEVYHRVVDNHEPLHLVAHDLNRRGVLSPKDYFAQLQGREPQGRKWSATALKRSMISEAMLGYATLNGKIVRDDDGAPLVRAEPILTREQLEALRAEFVKTSRAKPAVSTPSLLLRVLFCAVCGEPAYKFAGGGRKHPRYRCRSMGFPKHCGNGTVAMAEWDAFCEGQVLSLLGDAERLEKVRVAGSDSAVELAEVNAELVDLTSLIGSPAYRAGSPQREALDARIAALAARQEELGGLEARPSGWEWRETGQRFGDWWREQDTAAKNTWLRSMNVRLTFDVRGGLTRTIDFGDLQEYEQHLRLGSVVERLHTGVS

SEQ ID NO: 13044 - protein, 500 aa, synthetic construct
MRALVVIRLSRVTDATTSPERQLESCQQLCAQRGWDVVGVAEDLDVSGAVDPFNRKRRPNLARWLAFEEQPFDVIVAYRVDRLARSIRHLQQLVHWAEDHKKLVVSATEAHFDTTTPFAAVVIALMGTVAQMELEAIRERSRSAAHFNIRAGKYRGSLPPWGYLPTRVDGEWRLAPDPVQRERILEVYHRVVDNHEPLHLVAHDLNRRGVLSPKDYFAQLQGREPQGRKWSATALKRSMISGAMLGYATLNGKTVRGDDGAPLVRAEPILTREQLEALRAELVKTSRAKPAVSTPSLLLRVLFCAVCGEPAYKFAGGGRKHPRYRCRSMGFPKHCGNGTVAMAEWDAFCEEQVLNLLGDAERLEKVWVAGSDSAVELAEVNAELVDLTSLIGSPAYRAGSPQREALDARIAALAARQEELEGLEARPSGWEWRETGQRFGDWWREQDTAAKNTWLRSMNVRLTFDGRGRLTRTIDFGDLQEYEQHLRLGGVVERLHTGVS

SEQ ID NO: 13045 - protein, 500 aa, synthetic construct
MRALVVIRLSRVTDATTSPERQLESCQQLCAQRGWDVVGVAEDLDVSGAVDPFDRKRRPNLARWLAFEEQPFDVIVAYRVDRLTRSTRHLQQLVHWAEDHKKLVVSATEAHFDTTTPFAAVVIALMGTVAQMELDAIKERNRSAAHFNIRAGKYRGSLPPWGYLPARVDGEWRLAPDPVQRERILEVYHRVVDNHEPLHLVAHDLNRRGVLSPKDYFAQLRGREPQGRKWSATALKRSMISEAMLGYATLNGKTVRDDDGAPLVRAEPVLTREQLEALRAELVRTSRAKPAVSTPSLLLRVLFCAVCGEPAYKFAGGGRKHPRYRCRSMGFPEHCGNGTVAMAEWDAFCEEQVLGLLGDAERLVKVWVAGSDSAVELAEVNAELVDLMSLIGSPAYRAGSPQREALDARIAALAARQEELEGLEARPSGWEWRETGQRFGDWWREQDTAAKNSWLRSMNVRLTFDVRGGLTRTIDFGDLQEYEQHLRLGSVVERLHTGMS

SEQ ID NO: 13046 - protein, 500 aa, synthetic construct
MRALVVIRLSRVTDATTSPERQLESCRQLCAQRGWDVVGVAEDLDVSGAVDPFDRKRRPNLARWLAFEGQPFDVIVAYRVDRLARSIRHLQQLVHWAEDNKKLVVSATEAHFDTTTPFAAVVIALMGTVAQMELEAIKERSRSAAHFNIRAGKYRGSLPPWGYLPARVDGEWRLVPDPVQRERILEVYHRVVDNHEPLHLVAHDLNRRGVLSPKDYFAQLQGREPQGRKWSATALKRSMISEAMLGYATLNGRIVRDDDGAPLVRAEPILTREQLEALRAEFVKTSRAKPAVSTPSLLLRVLFCAVCGEPAYKFAGGGRKHPRYRCRSMGFPKHCGNGTVAMAEWDAFCEEQVLNLLGDAERLEKVWVAGSDSAIELAEVNAELVDLTSLIGSPAYRAGSPQREALDARIAALAARQEELEGLEARPSGWEWRETGQRFGDWWREQDTAAKNTWLRSMNVRLTFDVRGGLTRTIDFGDLQEYEQHLRLGNAVERLHTGTS

SEQ ID NO: 13047 - protein, 500 aa, synthetic construct
MRALVVIRLSRVTDATTSPERQLESCQQLCAQRGWDIVGVAEDLGVSGAVDPFDRKRRPNLARWLAFEEQPFDVIVAHRVDRLARSIRRLQQLVHWAEDHKKLVVSATEAHFDTTTPFAAVVIALMGTVAQMELEAIKERSRSAAHFNIRAGKYRGSLPPWGYLPARVDGEWRLVPDPVQRERILEVYHRVVDNHEPLHLVAHDLNRRGVLSPKDYFARLQGREPQGRKWSATALKRSMISEAMLGYATLNGKIVRDDDGAPLVRAEPILTREQLEALRAEFVKTSRAKPAVSTPSLLLRVLFCAVCGEPAYKFAGGGRKHPRYRCRSMGFPKHCGNGTVAMAEWDAFCEEQVLNLLGDAERLEKVWVAGSDSEVELAEVNAELVDLTSLIGSPAYRAGSPQREALDARIAALAARQEELEGLVARPSGWEWRETGQRFGDWWREQDTAAKNTWLRSMNVRLTFDVRGGLTRTIDFGDLREYEQHLRSGGVVERLHTGMS

SEQ ID NO: 13048 - protein, 500 aa, synthetic construct
MRALVVIRLSRVTDATTSPERQLESCQQLCAQRGWDVVGVAEDLDVSGAVDPFDRKRRPNLARWLASEEQPFDVIVAYRVDRLARSIRHLQQLVHWAEDHKKLVVSATEAHFDTTTPFAAVVIALMGTVAQMELEAIKERSRSAAHFNIRAGKYRGSLPPWGYLPTRVDGEWRLVPDPVQRERILEVYHRVVDNHEPLHLVAHDLNRRGVLSPKDYFAQLRGREPQGRKWSATALKRSMTSEAMLGYATLNGKTVRDDDGAPLVRAEPILTRGQLEALRAELVKTSRAKPAVSTPSLLLRVLFCAVCGEPAYKFAGGGRKHPRYRCRSMGFPKHCGNGTVAMAEWDTFCEEQVLDLLGDAERLEKVWVAGSDSAVELAEVNAELADLTSLIGSPAYRAGSPQREALDARIAALAARQEELEGLEARPSGWEWRGTGQRFGDWWREQDTAAKNTWLRSMNVRLMFDARGGLTRTIDLGDLQEYEQHLRLGSAVERLHTGMS

SEQ ID NO: 13049 - protein, 500 aa, synthetic construct
MRALVVIRLSRVTDATTSPERQLESCQQLCAQRGWDVVGVAEDLDVSGAVDPFDRKRRPNLARWLAFEGQPFDVIVAYRVDRLARSIRHLQQLVHWAEDHKKLVVSATEAHFDTTTPFAAVVIALMGTVAQMELEAIKERNRSAAHFNIRAGKYRGSLPPWGYLPTRVDGEWRLAPDPVQRERILEVYHRIVDNHEPLHLVAHDLNRRGVLSPKDYFAQLQGREPQGRKWSATALKRSMTSEAMLGHATLNGKTVRDDDGAPLVRAEPILTRGQLEALRAELVKTSRAKPAVSTPSLLLRVLFCAVCGEPAYKFAGGGRKHPRYRCRSMGFPKHCGNGTVAMAEWDAFCEEQVLNLLGDAERLEKVWVAGSDSAVELAEVNAELVDLTSLIGSPAYRAGSPQREALDARIAALAARQGELEGLEARPSGWEWRETGQRFGDWWREQDTAAKNTWLRSMNVRLTFDVRGGLTRTIDFGDLQEYEQHLRLGSVVERLHTGMS

SEQ ID NO: 13050 - protein, 500 aa, synthetic construct
MRALVVIRLSRVTDATTSPERQLESCQQLCAQRGWDVVGVAEDLDVSGTVDPFDRKRRPSLARWLAFEEQPFDVIVAYRVDRLTRSIRHLQQLVHWAEDHKKLVVSATEAHFDTTTPFAAVVIALMGTVAQMELEAIKERNRSAAHFNIRAGKYRGSLPPWGYLPARVDGEWRLVPDPVQRERILEVYHRVVDDHEPLHLVAHDLNRRGVLSPRDYFAQLRGREPQGRKWSATALKRSMISEAMLGYATLSGKTVRDDDGAPLVRAEPILTREQLEALRTELVKTSRAKPAVSTPSLLLRVLFCAVCGEPAYKFAGGGRKHPRYRCRSMGFPKHCGNGTVAMAEWDAFCEEQVLDLLGDAERLEKVWVAGSNSAVELAEVNAELVDLTSLIGSPAYRAGSPQREALDARIAALAARQEELEGLEARPSGWEWRETGQRFGDWWREQDTAAKNIWLRSMNVRLTFDVRGGLTRTIDFGDLQEYEQHLRLGNAVERLHTGMS

SEQ ID NO: 13051 - protein, 500 aa, synthetic construct
MRALVVIRLSRVTDATTSPERQLESCQQLCAQRGWDVVGVAEDLDVSGAVDPFDRKRRPNLARWLAFEEQPFDAIVAYRVDRLSRSIRHLQQLVHWAEDHKKLVVSATEAHFDTTTPFAAVVIALMGTVAQMELEAIKERSRSAAHFNIRAGKYRGSLPPWGYLPARVDGEWRLVPDPVQRERILEVYHRVVDDHEPLHLVARDLNRRGVLSPKDYFAQLQGREPQGRKWSATALKRSMISGAMLGYATLNGKTVRDDDGAPLVRAEPILTREQLEALRAELVKTSRAKPAVSTPSLLLRVLFCAVCGEPAYKFAGGGRKHPRYRCRSMGFPKHCGNGTVAMAEWDAFCEEQVLDLLGDAERLEKVWVAGSDSAVELAEVSAELVDLTSLIGSPAYRAGSPQREALDARIAALAARQEELEGLEARPSGWEWRETGQRFGDWWREQDTAAKNTWLRSMNVRLTFDVRGGLTRTIDFGELQEYEQHLRLGSVVERLHTGMS

SEQ ID NO: 13052 - protein, 500 aa, synthetic construct
MRALVVIRLSRVTDATTSPERQLESCQQLCAQRGWDVVGVAEDLDVSGAVDPFNRKRRPNLARWLAFEEQPFDVIVAYRVDRLTRSIRHLQQLAHWAEDHKKLVVSATEAHFDTTTPFAAVVVALMGTVAQMELEAIKERSRSAAHFNIRAGKYRGSLPPWGYLPARVDGEWRLAPDPVQRERILEVYHRVVDDHEPLHLVAHDLNRRGVLSPRDYFAQLRGREPQGRKWSATALKRSMTSEAMLGYATLSGKTVRDDDGAPLVRAEPILTREQLEALRAELAKTSRAKPAVSTPSLLLRVLFCAVCGEPAYKFAGGGRKHLRYRCRSMGFPKHCGNGTVAMAEWDAFCEEQVLGLLGDAERLEKVWVAGSDSAVELAGVNAELVDLTSLIGSPAYRAGSPQREALDARIAALAARQEELEGLEARPSGWEWRETGQRFGDWWREQDTAAKNTWLRSMNVRLTFDVRGGLTRTIDFGDLQEYEQHLRSGSVVERLYTGMS

SEQ ID NO: 13053 - protein, 500 aa, synthetic construct
MRALVVIRLSRVTDATTSPERQLESCQQLCAQRGWDVVGVAEDLDVSGAVDPFDRKRRPNLARWLAFEEQPFDVIVAYRVDRLTRSTRHLQQLVHWADDHKKLVVSATEAHFDTTTPFAAVVIALMGTVAQMELEAIKERSRSAAHFNIRAGKYRGSLPPWGYLPTRVDGVWRLVPDPVQRERILEVYHRVVNNHEPLHLVAHDLNRRGVLSPKDYFAQLQGREPLGRKWSATALKRSMISEAMLGYATLNGKTVRDDDGAPLVRAEPILTREQQEALRAELVKTSRAKPAVSTPSLLLRVLFCAVCGEPAYKFAGGGRKHPRYRCRSMGFPKHCGNGTVAMAEWDAFCEEQVLGLLGDAERLEKVWVAGSDSAVELAEVNAELVDLTSLIGSPAYRAGSPQREALDARIAALAARQEELGGLEARPSGWEWRETGQRFGDWWREQDTAAKNTWLRSMNVRLTFDVRGGLTRTTDFGDLQEYEQHLRLGSVVERLHTGMS

SEQ ID NO: 13054 - protein, 500 aa, synthetic construct
MRALVVIRLSRVTDATTSPERQLESCQQLCAQRGWDVVGVAEDLDVSGAVDPFDRKRRPNLARWLAFGEQPFDVIVAYRVDRLARSIRHLQQLVHWAEDHKKLVVSATEAHFDTTTPFAAVVIALMGTVAQMELEAIRERSRSAAHFNIRAGKYRGSLPPWGYLPARVDGEWRLVPDPVQRERILEVYHRVVDNHEPLHLVAHDLNRRGVLSPKDYFAQLRGREPQGRKWSATALKRSMISEAMLGYATLNGKTVRDDDGAPLVRAEPILTRGQLEALRAELVKSSRAKPAVSTPSLLLRVLFCAVCGEPAYKFAGGGRKHPRYRCRSMGFPKHCGNGTVAMAEWDAFCEEQVLNLLGDAERLEKVWVAGSDSAVELAEVNAELVDLTSLIGSPAYRAGSPQREALDARVAALAARQEELEGLEARPSGWEWRETGQRFGDWWREQDTAAKNAWLRSMNVRLTFDVRGGLTRTIDFGDLQGYEQHLRLGSVVERLHTGMS

SEQ ID NO: 13055 - protein, 500 aa, synthetic construct
MRALVVIRLSRVTDATTSPERQLESCQQLCAQRGWDVVGVAEDLDVSGAVDPFDHKRRPNLARWLAFEEQPFDVIVAYRVDRLTRSTRHLQQLVHWAEDHKKLVVSATEAHFDTTTPFAAVVIALMGTVAQMELEAIKERSRSAAHFNIRAGKYRGSLPPWGYLPTRVDGEWRLAPDPVQRERILEVYHRVVDNHEPLHLVAHDLNRRGVLSPKDYFAQLQGREPQGRKWSATALKRSMISEAMLGYATLNGKTVRDDSGAPLVRAEPILTREQLEALRAELVKTSRAKPAVPTPSLLLRVLFCAVCGEPAYKFAGGGRKHPRYRCRSMGFPKHCGNGTVAMAEWDAFCEEQVLDLLGDAERLEKVWVAGSDSALELAGVNAELVDLMSLVGSPAYRAGSPQREALDARIAALAARQEELGGLEARPSGWEWRETGQRFGDWWREQDTVAKNTWLRSMNVRLTFDVRGGLTRAIDFGDLQEYEQHLRLGRVVERLHTGMS

SEQ ID NO: 13056 - protein, 500 aa, synthetic construct
MRALVVIRLSRVTDATTSPERQLESCQQLCAQRGWDVVGVAEDLDVSGAVDPFDRKRRPNLARWLAFEEQPFDVVVAYRVDRLARSIRHLQQLVHWAEDHKKLVVSATEAHFDTTTPFAAVVIALMGTVAQMELEAIRERSRSAAHFNIRAGKYRGSLPPWGYLPTRVDGEWRLAPDPVQRERILEVYHRVVDNHEPLHLVAHDLNRRGVLSPKDYFAQLQGREPQGRKWSATALKRSMTSEAMLGYATLNGKTVRDDDGAPLVRAEPILTREQLEALRAELVKTSRAKPAVSTPSLLLRVLFCAVCGEPAYKFSGGGRKHPRYRCRSMGFPKHCGNGTVAMAEWDAFCEEQVLDLLGDAERLEKVWVAGSDSAVELAEVNAELVDLTSLIGSPAYRAGSPQREALDARIAALAARQAELEGLEARPSGWEWRETGQGFGDWWREQDTAAKNTWLRSMNVRLTFDVRGGQTRTIDFGDLQEYEQHLRLGSVVERLHTGMS

SEQ ID NO: 13057 - protein, 500 aa, synthetic construct
MRALVVIRLSRVTDATTSPERQLESCQQLCAQRGWDVVGVAEDLDVSGAVDPFDRKRRPNLARWLAFEGQPFDVIVAYRVDRLARSIRHLQQLVHWAEDHKKLVVSATEAHFDTTTPFAAVVIALMGTVAQMELEAIKERNRSAAHFNIRAGKYRGSLPPWGYLPTRVDGEWRLVPDPVQRERILEVYHRVVDNHEPLHLVAHDLNRRGVLSPKDYFAQLRGREPQGRKWSATALKRSMISVAMLGYATLNGKIVRDDDGAPLVRAEPILTREQLEALRAELVKTSRAKPAVSTPSLLLRVLFCAVCGEPAYKFAGGGRKHPRYRCRSMGFPKHCGNGTVAMAEWDAFCEEQVLDLLGDAERLEKVWVAGSDSAVELAEVDAELVDLTSLIGSPAYRAGSPQREALDARIAALAARQEELEGLEARPSGWEWRETGQRFGDWWREQDTAAKNTWLRSMNVRLTFDVRGELTRTIDFGDLQEYEQHLRLGSVVERLHTGMS

SEQ ID NO: 13058 - protein, 500 aa, synthetic construct
MRALVVIRLSRVTDATTSPERQLESCQQLCAQRGWDVVGVAEDLDVSGAVDPFDRKRRPNLACWLAFEEQPFDVIVAYRVDRLTRSTRHLQQLVHWAEDHKKLVVSATEAHFDTTTPFAAVVVALMGTVAQMELEAIKERSRSAAHFNIRAGKYRGSLPPWGYLPTRVDGEWRLVPDPVQRERILEVYHRVVVNREPLHLVAHDLNRRGVLSPKDYFALLRGREPQGREWSATALKRSMLSEAMLGYATLNGKTVRDDDGAPLVRAEPILTREQQEALRAELVKTSRAKPAVSTPSLLLRVLFCAVCGEPAYKFAGGGRKHPRYRCRSMGFPKHCGNGTVAMAEWDAFCEEQVLDLLGDAERLEKVWVAGSDSAAELAEVNAELVDLTNLIGSPAYRAGSPQREALDARIAALAARQAELEGLEARPSGWEWRETGQRFGDWWREQDTAAKNTWLRSMNVRLTFDVRGGLTRMIDFGDLQEYEQHLRSGSVVERLHTGMS

SEQ ID NO: 13059 - protein, 500 aa, synthetic construct
MRALVVIRLSRVTDATTSPERQLESCQQLCAQRGWDVVGVAEDLDVSGTVDPFDRKRRPNLARWLAFEEQPFDVIVAYRVDRLTRSTRHLQRLVHWAEDHKKLVVSATEAHFDTTTPFAAVVIALMGTVAQMELEAIKERNRSAAHFNIRAGKYRGSLPPWGYLPTRVDGEWRLVPDPVQRERILEVYHRVVDNHEPLYLVAHDLNRRGVLSPKDYFAQLQGREPQGCEWSATALKRSMISEAMLGYATLNGKTVRDDDGAPLVRAEPILTREQQEALRAELAKTSRAKPAVSTPSLLLRVLFCAVCGEPAYKFTGGGRKHPRYRCRSMGFPKHCGNGTVAMAEWDAFCEEQVLNLLGDAERLEKVWVAGSDSAVELAEVNAELVDLTSLIGSPAYRAGSPQREALDARIAALAARQGELEGLEARPSGWEWRETGQRFGDWWREQDTAAKNTWLRSMNVRLTFDVRGGLTRAIDFGDLQEYEQHLRLGSVVERLHTGMS

SEQ ID NO: 13060 - protein, 500 aa, synthetic construct
MRALVVIRLSRVTDATTSPERQLESCQQLCAQRGWDVVGVAEDLDVSGAVDPFDRKRRPNLARWLAFEEQPFDVMVAYRVDRLTRSIRHLQQLVHWAEDHKKLVASATEAHFDTTTPFAAVTIALMGTVAQMELEAIKERSRSAAHFNIRAGKYRGSLPPWGYLPTRVDREWRLAPDPVQRERILEVYHRVVDDHEPLHSVAHDLNRRGVLSPRDYFAQLQGREPRGRKWSATALKRSMISEAMLGYVTLNGKTVRDDDGAPLVRAEPILTREQLEALRAELVKTSRAKPAVSTPSLLLRVLFCAVCGEPAYKFAGGGRKHPRYRCRSMGFPEHCGNGTVAMAEWDAFCEEQVLDLLGDAERLEKVWVAGSDSAVELAEVNAELVDLTSLIGSPAYRAGSPQREALDARIAALAARQEELEGLEARPSGWGWRETGQRFGDWWREQDTAAKNTWLRSMNVRLTFDARGGLTRTIDFGDLQEYEQQLRLGSVVERLHTGMS

SEQ ID NO: 13061 - protein, 500 aa, synthetic construct
MRALVVIRLSRVTDATTSPERQLESCQQLCAQRGWDVVGVAEDLDVSGAVDPFDRKRRPNLARWLAFEEQPFDVIVAYRVDRLARSIRHLQQLVHWAEDHKKLVVSATEAHFDTTTPFAAVVIALMGTVAQMELEAIKERNRSAAHFNIRAGKYRGSLPPWGYLPTRVDGEWRLVPDPVQRERILEVYHRVVDNHEPLHLVAHDLNRRGVLSPRDYFAQLQGREPQGRKWSATALKRSMTSEAMLGYATLNGKTVRGDDGAPLVRAEPILTREQLEALRAELVKTSRAKPAVSTPSLLLRVLFCAVCGEPAYKFAGGGRKHPRYRCRSMGFPKHCGNGTVAMAEWDAFCEEQVLGLLGNAERLKKVWVAGSDSAVELAEVSAELVDLTSLIGSPAYRAGSPQREALDARIAALAARQEELEGLEARPSGWEWRETGQRFGDWWREQDTAAKNTWLRSMNVRLTFDVRGGLTRTIDFGDLQEYEQHLRLGNAVERLHTGMS

SEQ ID NO: 13062 - protein, 500 aa, synthetic construct
MRALVVIRLSRVTDATTSPERQLESCQQLCTQRGWDVVGVAEDLDVSGAVDPFDRKRRPNLARWLAFEEQPFDAIVAYRVDRLTRSIRHLQQLVHWAEDHKKLVVSATEAHFDTTTPFAAVVIALMGTVAQMELEAIKERNRSAAHFNIRAGKYRGSLPPWGYLPARVDGVWRLVPDPVQRERILEVYHRVVDKHEPLHLVAHDLNRRGVLSPKDYFAQLQGREPQGRKWSATALKRSMISEAMLGYATLNGKTVRDDDGAPLVRAEPILTREQLETLRAVLVKTSRAKPAVSTPSLLLRVLFCAVCGEPAYKFSGGGRKHPRYRCRSMGFPKHCGNGTVAMAEWDAFCEEQVLGLLGDAERLEKVWVAGSDSAVELAEVNAELVDLTSLIGSPAYRADSPQREALDARIAALAARQEELEGLEARPSSWEWRETGQRFGDWWREQDTAAKNTWLRSMNVRLTFDVRGGLARTIDLGDLQEYEQHLRSGSVVERLHTGMS

SEQ ID NO: 13063 - protein, 500 aa, synthetic construct
MRALIVIRLSRVTDATTSPERQLESCRQLCAQRGWDVVGVAEDLDVSGAVDPFDRKRRPNLARWLAFEEQPFDVIVAYRVDRLTRSTRRLQQLVHWAEDHKKLVVSATEAHFDTTTPFAAVVIALMGTVAQMELEAIKERSRSAAHFNIRAGKYRGSLPPWGYLPARVDGEWRLVPDPVQRERILEVYHRVVDNHEPLHLVAHDLNRRGVLSPKDYFAQLRGREPQGRKWSATALKRSMISEAMLGYATLNGKTVRDDDGAPLVRAEPILTREQQEALRAELVKTSRAKPAVSTPSLLLRVLFCAVCGEPAYKFAGGGRKHPRYRCRSMGFPKHCGNGTVAMAEWDAFCEEQVLGLLGDAERLEKVWVAGSDSAVELAEVNAELVDLTSLISSPAYRAGSPQREALDARIAALAARQEELEGLEARPSGWEWRETGQRFGDWWREQDTAAKNTWLRSMNVRLTFDVRGGLTRTVDFGELQEYEQHLRLGSVVERLHTGMS

SEQ ID NO: 13064 - protein, 500 aa, synthetic construct
MRALVVIRLSRVTDATTSPERQLESCQQLCAQRGWDVVGVAEDLDVSGAVDPFDRKRRPNLARWLAFEEQPFDVIVAYRVDRLTRSIRHLQQLVHWAEDHKKLVVSATEAYFDTTTPFAAVVIALMGTVAQLELEAIKERSRSAAHFNIRAGKYRGSLPPWGYLPTRVDGEWRLAPDPVQRERILEVYHRVVNNHEPLHLVAHDLNRRGVLSPKDYFAQLQGREPRGRKWSATALKRSMTSEAMLGYATLNGKTVRDDDGAPLVRAEPILTREQLEALRAELAKTSRAKPAVSTPSLLLHVLFCAVCGEPAYKFSGGGRKHPRYRCRSMGFPKHCGNGTVAMAEWDAFCEEQVLDLLGDAERLEKVWVAGSDSAVELAEVNAELVDLTSLIGSPAYRAGSPQREALDARIAALAARQAELEGIEARPSGWEWRETGQGFGDWWREQDTAAKNTWLRSMNVRLTFDVRGGLTSTIDFGDLQEYEQRLRLGSLVERLHTGMS

SEQ ID NO: 13065 - protein, 500 aa, synthetic construct
MRALVVIRLSRVTDATTSPERQLESCQQLCAQRGWNVVGVAEDLDVSGAVDPFDRKRRPNLARWLAFEEQPFDVIVAYRVDRLARSIRHLQQLVHWAEDHKKLVVSATEAHFDTTTPFAAVVIALMGTVAQMELEAIKERNRSAAHFNIRAGKYRGSLPPWGYLPTRVDGEWRLVPDPVQRERILEVYHRVVDDHEPLHLVAHDLNRRGVLSPKDYFAQLRGREPQGREWSATALKRSMISEAMLGYATLNGKTVRDDDGAPLVRAEPILTREQQEALRAELVKTSRAKPAVSTPSLLLRVLFCAVCGEPAYKFAGGGRKHPRYRCRSMGFPKHCGNGTVAMAEWDSFCEEQVLGLLGDAERLEKVWVAGSDFAVELAEVNAELVDLTSLLGSPAYRAGSPQRETLDARIAALAARQEELEGLEARPSGWEWRGTGQRFGDWWRMQDTAAKNTWLRSMNVRLTFDVRGGLTRTIDFGDLQEYEQHLRLGSVVEHLHTGMS

SEQ ID NO: 13066 - protein, 500 aa, synthetic construct
MRALVVVRLSRVTDATTSPERQLESCQQLCAQRGWDVVGVAEDLDVSGAVDPFDRKRRPNLARWLAFEERPFDAIVVYRVDRLTRSIRHLQQLVHWAEDHKKLVVSATEAHFDTTTPFAAVVIALMGTVAQMELEAIKERNRSAAHFNIRAGKYRGSLPPWGYLPTRVDGEWRLAPDPVQRERILEVYHRVVDNHEPLHLVAHDLNRRGVLSPKDYFAQLRGREPQGRKWSATALKRSMTSEAMLGYATLNGKTVRDDDGAPLVRAEPILTREQLEALRAELVKTSRAKPAVSTPSLLLRVLFCAVCGEPAYKFAGGGRKHPRYRCRSMGFPKHCGNGTVAMAEWDGFCEEQVLDLLGDAERLEKVWVAGSDFAVELAEVNAELVDLTSLISSPAYRAGSPQRGALDARIAALAARQEELEGLEARPSGWEWRETGQRFGDWWREQDTAAKNTWLRSMNVRLTFDVRGGLTRTIDFGDLQEYEQQLRLGSVDERLHTGMS

SEQ ID NO: 13067 - protein, 500 aa, synthetic construct
MRALVVIRLSRVTDATTSPERQLESCQQLCAQRGWDVVGIAEDLDVSGAVDPFDRKRRPNLARWLAFEEQPFDVIVAYRVDRLARSIRHLQQLVHWAEDHKKLVVSATEAHFDTTTPFAAVVIALMGTVAQMELEAIKERSRSAAHFNIRAGKYRGSLPPWGYLPARVDGEWRLVPDPVQRERILEVYHRVVNNHEPLHLVAHDLNRRGVLSPKDYFAQLRGREPQGRKWSTTALKRSMTSEAMLGYATLNGKTVRGDDGAPLVRAEPILTREQREALRAELVKTSRAKPAVSTPSLLLRVLFCAVCGEPAYKFSGGGRKHPRYRCRSMGFLKHCGNGTVAMAEWDAFCEEQVLDLLGDAERLEKVWVAGSDSAVELAEVNAELVDLTSLISSPAYRAGSPQREALDARIAALAARQEELEGLEARPSGWEWRGTGQRFGDWWREQDTAAKNTWLRSMNVRLTFDVRGGLTRTIDFGDLQEYEQHLRLGSVVERLHTGMS

SEQ ID NO: 13068 - protein, 500 aa, synthetic construct
MRALVVIRLSRVTDATTSPERQLESCQQLCAQRGWDVVGVAEDLDVSGAVDPFDRKRRPNLARWLAFEEQPFDVIVAYRVDRLTRSIRHLQQLVHWAEDHKKLVVSATEAHFDMTTPFAAVVIALMGTVAQMELEAIKERSRSAAHFNIRAGKYRGSLPPWGYLPTRVDGEWRLAPDPVQRERILEVYHRVVDNHEPLHLVAHDLNRRGVLSPKDYFAQLQGREPQGRKWSATALKRSMISVAMLGYATLNGKTVRDGDGAPLVRAEPILTREQLEALRAELVKTSRAKPAVSTPSLLLRVLFCGVCGEPAYKFAGGGRKHPRYRCRSMGFLKHCGNGTVAMAEWDEFCEEQVLDLLGDAERLEKVWVAGSDSAVELAEVNAELVDLTSLIGSPAYRAGSPQREALDARIAALAARQEELEGLEARPSGWEWRGTGQRFGDWWREQDTAAKNTWLRSMNVRLTFDVRGGLTRTIDFGDLQEYELHLRLGSAVERLHTGMS

SEQ ID NO: 13069 - protein, 500 aa, synthetic construct
MRALVVIRLSRVTDATTSPERQLESCQQLCAQRGWDVVGVAEDLDVSGAVEPFDRKRRPNLARWLAFEEQPFDVIVAYRVDRLARSIRHLQQLVHWAEDHKKLVVSATEAHFDTTTPFAAVVIALMGTVAQMELEAIKERSRSAAHFNIRAGKYRGSLPPWGYLPTRVDGEWRLVPDPVQRERILEVYHRVVDNHEPLHLVAHNLNRRGVLSPKDYFAQLQGREPRGRKWSATALKRSMISVAMLGYATLNGRTVRDDDGAPLVRAEPILTREQLEALRAELVKTSRAKPAVSTPSLLLRVLFCAVCGEPAYKFAGGGRKHPRYRCRSMGFPKHCGNGTVAMAEWDAFCEEQVLGLLGDVERLEKVWVAGSDSAVELAEVNAELVDLTSLIGSPAYRAGSPQRGALDARIAALAARQGELEGLEARPSGWEWRETGQRFGDWWREQDTAAKNTWLRSMNVRLTFDVRGGLTRTIDFGDLQEYEQHLRSGSVAERLHTGMS

SEQ ID NO: 13070 - protein, 500 aa, synthetic construct
MRALAVIRLSRVTDATTSPERQLESCQQLCAQRGWDVVGVAEDLDVSGAVDPFDRKRRPNLARWLAFEEQPFDVIVAYRVDRLTRSTRHLQRLVHWAEDHKKLVVSATEAHFDTTTPFAAVVIALMGTVAQMELEAIKERNRSAAHFNIRAGKYRGSLPPWGYLPTRVDGEWRLVPDPVQRERILEVYHRVVDNHEPLHLVAHDLNRRGVLSPKDYFAQLRGREPQGRKWSATALKRSMVSEAMLGYATLNGKTVRDDDGAPLVRAEPILTRVQLEALRAELVKTSRAKPAVSTPSLLLRVLFCAVCGEPAYKFAGGGRKHPRYRCRSMGFPKHCGNGTVAMAEWDAFCEEQVLNLIGDAERLEKVWVAGSDSAVELAEVNAELVDLTSLIGSPAYRAGSPQREALDARIAALAARQEELEGLEARPSGWEWRETGQRFGDWWREQDTAAKNTWLRSMNVRLTFDVRGGLARTIDFGDLQEYEQHLRLGSVVERLHTGMS

SEQ ID NO: 13071 - protein, 500 aa, synthetic construct
MRALVVIRLSRVTDATTSPERQLESCQQLCAQRGWDVVGVAEDLDVSGAVDPFDRKRRPNLARWLAYEEQPFDAIVAYRVDRLARSIRHLQQLVHWAEDHKKLVVSATEAHFDTTTPFAAVVIALMGTVAQMELEAIKERSRSAVHFNIRAGKYRGSLPPWGYLPARVDGVWRLAPDPVQRERILEVYHRVVDNHEPLNLVAHDLNRRGVLSPKDYFAQLQGREPQGRKWSATALKRSMISEAMLGYATLNGKTVRDDDGAPLVRAEPILTHEQQEALRAELVKTSRAKPAVSTPSLLLRVLFCAVCGEPAYKFAGGGRKHPRYRCRSMGFPKHCGNGTVAMAEWDAFCEEQVLDLLGDAERLEKVWVAGSDFAVELAEVNAELVDLASLIGSPAYRAGSPQREALDARIAALAARQVELEGSEARPSGWEWRETGQRFGDWWREQDTAAKNTWLRSMNVRLTFDVRGGLTRTIDFGDLQEYEQHLRLGSVVGRLHTGMS

SEQ ID NO: 13072 - protein, 500 aa, synthetic construct
MRALVVIRLSRVTDATTSPERQLESCQQLCAQRGWDVVGVAEDLDVSGAVDPFDRKRRPNLARWLAFDEQPFDVIVAYRVDRLTRSVRHLQQLVHWAEDHKKLVVSATEAHFDTTTPFAAVVTALMGTVAQMELEAIKERNRSAAHFNIRAGKYRGSLPPWGYLPTRVDGEWRLVPDPVQRERILEVYHRVVDNHEPLHLVAHDLNRRGILSPKDYFAQLRGREPQGRKWSATALKRSMTSVAMLGYATLCGETVRDDDGAPLVRAEPILTREQLEALRAELVKTSRAKPAVSTPSLLLRVLFCAVCGEPAYKFSGGGRKHPRYRCRSMGFPKHCGNGTVAMAEWDAFCEEQVLNLLGDAERLEKVWVAGSDSAVELAEVNAELVDLTSLIGSPAYRVGSPQREALDARIAALAARQEELEGLEARPSGWEWRGTGQRFGDWWREQDTTAKNTWLRSMNVRLTFDVRGGLTRTIDFGDLQEYERHLRLGSVDERSHTGMS

SEQ ID NO: 13073 - protein, 500 aa, synthetic construct
MRALVVIRLSRVTDATTSPERQLESCQQLCAQRGWDVAGVAEDLDVSGAVDPFDRKRRPNLARWLAFEEQPFDVIVAYRVDRLTRSTRHLQQLVHWAENHKKLVVSATEAHFDTTTPFAAVVIALMGTVAQMELEAIKERNRSAAHFNIRAGKYRGSLPPWGYLPTRVDGEWRLVPDPVQRERILEVYHRVVDNHEPLHLVAHDLNRRGVLSPKDYFAQLRGREPQGRKWSATALKRSMISEAMLGYATLNGKTVRDDDGAPLVRAEPILTREQLEAIRAELVKTSRAKPAVSTPSLLLRVLFCAVCGEPAYKFSGGGRKHPRYRCRSMGFPKHCGNGTVAMAEWDAFCEEQVLDLLGDAERLEKVWVAGSDSAVELVEVNAELVDLTSLIGSPAYRAGSPQREALDARIAALAARQGELEGLEARPSGWEWRETGQRFGDWWREQDTAAKNTWLRSMNVRLTFDVRGGLTRTIDFGDLQEYEQHLRLGSVVERLHTGMS

SEQ ID NO: 13074 - protein, 500 aa, synthetic construct
MRALVVIRLSRVTDATTSPERQLESCQQLCAQRGWDVVGVAEDLDVSGAVNPFDRKRRPNLARWLAFEEQPFDVIVAYRVDRLTRSTRHLQQLVHWAEDHKKLVVSATEAHFDTTTPFAAVVIALMGTVAQMELEAIKERNRSAAHFNIRAGKYRGSLPPWGYLPARVDGEWRLVPDPVQRERILEVYHRVVDNHEPLHLVAHDLNRRGVLSPRDYFAQLQGREPQGRKWSATALKRSLISEAMLGYATLNGKTVRDDDGAPLVRAEPILTRERLEALRVELVKTSRAKPAVSTPSLLLRVLFCAVCGEPAYKFAGGGRKHPRYRCRSMGFPKHCGNGTLAMAEWDAFCEEQVLNLLGDAERLEKVWVAGSDSAVKLAEVNAELVDLTSLIGSPAYRAGSPQREALDARIAALAARQEELEGLEARPSGWEWRGTGQRFGDWWREQDTAAKNTWLRSMNVRLTFDVRGGLTRTIDFGDLQEYEQHLRLGSVVERLHTGMS

SEQ ID NO: 13075 - protein, 500 aa, synthetic construct
MRALVVIRLSRVTDATTSPERQLESCQQLCAQRGWDVVGVAEDLDVSGAVDPFDRKRRPNLARWLAFEEQPFDVIVAYRVDRLARSIRHLQQLVHWAEDHKKIVVSATEAHFDTTTPFAAVVIALMGTVAQMESEAIKERSRSAAHFNIRAGKYRGSLPPWGYLPTRVNGEWRLVPDPVQRERILEVYHRVVDNHEPLHSVAHDLNRRGVLSPKDYFAQLQGREPQGRKWSATALKRSMISEAMLGYATLNGKTVRNDDGAPLVRAEPILTREQLEALRAELVKTSRAKPAVSTPSLLLRVLFCAVCGEPAYKFAGGGRKHPRYRCRSMGFPKHCGNGTVAMAEWDAFCEEQVLDLLGDAERLEKVWVAGSDSAVELAEVNAELVDLTSLIGSPAYRAGSPQRETLDARIAALAARQEKLEGLEARPSGWEWRETGQRFGDWWREQDTAAKNAWLRSMNVRLAFDVRGGLTRTIDLGDLQEYEQHLRLGSVVERLHTGMS

SEQ ID NO: 13076 - protein, 500 aa, synthetic construct
MRALVVIRLSRVTDATTSPERQLESCQQLCAQRGWDVVGVAEDLDASGAVDPFDRKRRPNLARWLAFEEQPFDVIVAYRVDRLTRSIRHLQQLVHWAEDHKKLVVSATEAHFDTTTPFAAVTIALMGTVAQMELEAIKERSRSAAHFNIRAGKYRGSLPPWGYLPTRVDGEWRLAPDPVQRERILEVYHRVVDDHEPLHSVAHDLNRRGVLSPRDYFAQLQGREPRGRKWSATALKRSMISEAMLGHVTLNGKTVRDDDGAPLVRAEPILTREQLEALRAELVKTSRAKPAVSTPSLLLRVLFCAVCGEPAYKFAGGGRKHPRYRCRSMGFPKHCGNGTVAMAEWDAFCEEQVLGLLGDVERLEKVWVAGSDSAVKLAEVNAELVDLTGLIGSPAYRAGSPQRGALDARIAALAARQEELEGLEARPSGWEWRGTGRRFGDWWRELDTAAKNTWLRSMNVRLTFDVRGGLTRTIDFGDLQEYEQHLRLGSAVERLHTGMS

SEQ ID NO: 13077 - protein, 500 aa, synthetic construct
MRALVVIRLSRVTDATTSPERQLESCQQLCAQRGWDVVGVAEDLDVSGAVDPFDRKRRPNLARWLAFEEQPFDVIVAYRVDRLTRSIRHLQQLVHWAEDHKKLVVSATEAHFDTTTPFAAVTIALMGTVAQMELEAIKERSRSAAHFNIRAGKYRGSLPPWGYLPTRVDGEWRLAPDPVQRERILEVYHRVVDDHEPLHSVAHDLNRRGVLSPRDYFAQLQGREPRGRKWSATALKRSMISEAMLGYVTLNGKTVRDGDGAPLVRAEPILTREQLEALRAELVKTSRAKPAVSTPSLLLRVLFCAVCGEPAYKFAGGGRKHPRYRCRSMGFPKHCGNGTVAMAEWDAFCEEQVLNLLGDTERLEKVWVAGSDSAAELAEVNAELVDLTSLIGSPAYRTGSPQREALDARIAALAARQEELEGLEARPSGWEWRGTGQRFGDWWREQGTAAKNTWLRSMNVRLTFDVRGGLTRTIDFGDLQEYEQHLRLGSVVERLHTGMS

SEQ ID NO: 13078 - protein, 500 aa, synthetic construct
MRALVVIRLSRVTDATTSPERQLESCQQLCAQRGWDVVGVAEDLDVSGAVDPFDRKRRPNLARWLAFEERPFDVIVAYRVDRLTRSIRHLQQLVHWAEDHKKLVVSATEAHFDTTTPFAAVVIALMGTVAQMELEAIKERSRSAAHFNIRAGKYRGSLPPWGYLPTRVDGEWRLAPDPVQRERILEVYHRVVDNHEPLHLVAHDLNRRGVLSPKDYFAQLQGREPQGRKWSATALKRSMISVAMLGYATLNGKTVRDDDGAPLVRAEPILTRGQLEALRAELVKTSRAKPAVSTPSLLLRVLFCAVCGEPAYKFAGGGRKHPRYRCRSMGFPEHCGNGTVAMAEWDTFCEEQVLNLLGDAERLEKVWVAGSDSAVELAEVNAELVDLTSLVGSPAYRAGSPQREALDARIAALAARQEELEGLEARPSGWEWRGTGQRFGDWWREQDTAAKNTWLRSMNVRLTFDVRGGLTRTIDFGDLQEYEQHLRLGSVVERPHTGMS

SEQ ID NO: 13079 - protein, 500 aa, synthetic construct
MRALVVIRLSRVTDATTSPERQLESCQQLCAQRGWDVVGVAEDLDVSGAVDPFDRKRRPNLARWLAFEEQPFDVIVAYRVDRLARSIRHLQQLVHWAEDHKKLVVSATEAHFDTTTPFAAVVIALMGTVAQMELEAIKERSRSAAHFNIRAGKYRGSLPPWGYLPTRVDGEWRLVPDPVQRERILEVYHRVVDNHEPLHLVAHDLNRRGVLSPKDYFAQLRGREPQGRKWSATALKRSMTSEAMLGYATLNGKTVRDDDGAPLVRAEPILTREQLEALRAELVKTSRAKPAVSTPSLLLRVLFCAVCGEPAYKFAGGGRKHPRYRCRSMGFPKHCGNGSVAMAEWDAFCEEQVLNLLGDAERLEKVWVAGSDSAVELAEVNAELVDLTSLIGSPAYRAGSPQREALDARIAAMAARQEELEGLEARPSGWEWRETGQRFGDWWREQDTAAKNTWLRSMNVRLTFDVRGGLTRAIDFGDLQEYEQHLRSGSVVERLHTGMS

SEQ ID NO: 13080 - protein, 500 aa, synthetic construct
MRALVVIRLSRVTDATTSPERQLESCQQLCAQRGWDVVGVAEDLDVSGAVDPFDRKRRPNLARWLAFEEQPFDVIVAYRVDRLTRSTRHLQQLVHWAEDHKKLIVSTTEAHFDTTTPFAAVVIALMGTVAQMELEAIKERTRSAAHFNIRAGKYRGSLPPWGYLPARVDGEWRLAPDPVQRERILEVYHRVVDNHEPLHLVAHDLNRRGVLSPRDYFARLRGREPQGRKWSATALKRSMISEAMLGYATLNGMTVRDDDGAPLVRAKSILTREQLEALRAELVKTSRAKPAVSTPSLLLRVLFCAVCGEPAYKFAGGGRKHPRYRCRSMGFPKHCGNGTVAMVEWDAFCEEQVLDLLGDAERLEKVWVAGSDSAVELAEVNAELVDLTSLIGSPAYRAGSPQREALDARIAALAARQEELEGLEARPSGWEWRETGQRFRDWWREQDTAAKNTWLRSMNVRLTFDVRGGLTRTIDFGDLQEYEQHLRLGSVVERLHTGMS

SEQ ID NO: 13081 - protein, 500 aa, synthetic construct
MRALVVIRLSRVTDATTSPERQLESCQQLCAQRGWDVVGVAEDLDVSGAVDPFNRKRRPNLARWLASEEQPFDVIVAYRVDRLTRSVRHLQQLVHWAEDHKKLVVSATEAHFDTTTPFAAVVIALMGTVAQMELEAIKERNRSAAHFNIRAGKYRGSLPPWGYLPTRVDGEWRLAPDPVQRERILEVYHRVVDNHEPLHLVAHDLNRRGVLSPKDYFAQLQGREPQGRKWSATALKRSMISVAMLGYATLNGKTVRDDDGAPLVRAEPILTREQLEALRAELVKTSRAKPAVSTPSLLLRVLFCAVCGEPAYKFAGGGRRHPRYRCRSMGFPKHCGNGTVAMAEWDAFCEEQVLDLLGDAERLEKVWVAGSDSAVELAEVNAELEDLTSLIGSPAYRAGSPQREALDARIVALAARQEELEGLEARPSGWEWRETGQRFGDWWREQDTAAKNTWLRSMNVRLTFDVRGGLTRTIDFGDLQEYEQYLRLGSEVERLHAGMS

SEQ ID NO: 13082 - protein, 500 aa, synthetic construct
MRALIVIRLSRVTDATTSPVRQLESCRQLCAQRGWDVVGVAEDLDVSGAVDPFDRKRRPNLACWLAFEEQPFDVIVAYRVDRLTRSIRHLQQLVHWAEDHKKLVVSATEAHFDTTTPFAAVVIALMGTVAQMELEAIKERSRSAAHFNIRAGKYRGSLPPWGYLPTRVDGEWRLAPDPVQRERILEVYHRVVDNHEPLHLVAHDLNRRGVLSPRDYFAQLQGREPQGRKWSATALKRSMTSEAMLGYATLNGKTVRGDDGAPLVRAEPILTREQLEALRAELVKTSRAKPAVSTPSLLLRVLFCAVCGEPAYKFAGGGRKHPRYRCRSMGFPKHCGNGTVAMAEWDAFCEEQVLDLLGDADHLEKVRVAGSDSPAELAEVNAELVDLTSLIGSPAYRAGSPQREALDARIATLVARQEELEGLEARPSGWEWRETGQRFGDWWREQDTAAKNTWLRTMNVRLTFDVRGGLTRTIDFGELQEYEQHLRSGSVVERSHTGMS

SEQ ID NO: 13083 - protein, 500 aa, synthetic construct
MRALVVIRLSRVTDATTSPERQLESCQQLCAQRGWDVVGVAEDLDVSGAVGPFDRKRRPNLARWLAFEEQPFDVIVAYRVDRLTRSIRHLQQLVHWAEDHKKLVVSATEAHFDTTTPFAAVVIALMGTVAQMELEAIKERSRSAAHFNIRAGKYRGSLPPWGYLPTRVDGEWRLAPDPVQRGRILEVYHRVVDNHEPLHLVAHDLNRRGVLSPKDYFAQLRGREPQGRKWSATALKRSMTSEAMLGYATLNGKTVRDDDGAPLVRAEPILTREQLEALRAELVKTSRAKPAVSTPSLLLRVLFCAVCGEPAYKFAGGGRKHPRYRCRSMGFPKHCGNGTVAMAEWDAFCEEQVLGLLGDAEHLEKVWVAGSGSAVELAEVNAELVDLTSLIGSPAYRAGSPQREALDARIAALAARQEELEGLEARPSGWEWRKTGQRFGDWWREQDTAAKNTWLRSMNVRLTFDVRGGLTRTIDFGDLQEYAQHLRLGSVVERLHTGMS

SEQ ID NO: 13084 - protein, 500 aa, synthetic construct
MRALVVIRLSRVTDATTSPERQLESCQQLCAQRGWDVVGVAEDLDVSGAVDPFDRKRRPNLARWLAFEEQPFDVIVAYRVDRLTRSVRHLQQLVHWAEDHKKLVVSATEAHFDTTTPLAAVVIALMGTVAQMELEAIRERSRSAAHFNIRAGKYRGSLPPWGYLPSRVDGEWRLVPDPVQRERILEVYHRVVDNHEPLHLVAHDLNRRGVLSPKDYFAQLRGREPQGRKWSATALKRSMISEAMLGYATLSGKTVRDDDGAPLVRAEPILTREQLEALRAELDKTSRAKPAVPTPSLLLRVLFCAVCGEPAYKFSGGGRKHPRYRCRSMGFPKHCGNGTVAMAEWDAFCEEQVLDLLGDVERLEKVWVTGSDSAVELAEVNAELVDLTSLIGSPAYRVGSPQREALDARVAALAARQEELEGLEARPSGWEWRETGQRFGDWWREQDTAAKNTWLRSMNVRLTFDVRGGLTRTIDFGDLQEYEQHLRLGSVVERLHTGMS

SEQ ID NO: 13085 - protein, 500 aa, synthetic construct
MRVLVVIRLSRVTDATTSPERQLESCRQLCAQRGWDVAGVAEDLDVSGAVDPFDRKRRPNLARWLAFEEQPFDAIVAYRVDRLTRSIRHLQQLVHWAEDHRKLVVSATEAHFDTTTPFAAVVIALMGTVAQMELEAVKERNRSAAHFNIRAGKYRGSLPPWGYLPTRVDGEWRLAPDPVQRERILEVYHRVVDNHEPLHLVAHDLNRRGVLSPKDYFAQLRGREPQGRKWSATALKRSMISEAMLGYATLNGKIVRDDDGAPLVRAEPILTREQLEALRAELVKTSRAKPAVSTPSLLLRVLFCAVCGEPAYKFAGGGRKHPRYRCRSMGFPKHCGNGTVAMAEWDAFCEKQVLDLLGDAERLEKVWVAGSDSAVELAEVNAELVDLTSLIGSPAYRAGSPQREALDARIAALAARQGELEGLEARPSGWEWRETGQRFGDWWREQDTAAKNTWLRSMNVRLTFDVRGGLTRTIDFGDLREYEQHLRLGSVVERLHAGMS

SEQ ID NO: 13086 - protein, 500 aa, synthetic construct
MHALVVIRLSRATDATTSPERQLESCQQLCAQRGWDVVGVAEDLDVSGAVDPFDRKRRPNLARWLAFEEQPFDAIVAYRVDRLTRSIRHLQQLVHWAEDHKKLVVSATEAHFDTTTPFAAVVIALVGTVAQMELEAIKERNRSAAHFNIRAGKYRGSLPPWGYLPTRVDGEWRLVPDPVQRERILEVYRRVVDNHEPLHLVAHDLNRRGVLSPKDYFAQLRGREPQGRKWSATALKRSMISETMLGYATLNGKTVRDEDGAPLVRAEPILTREQREALRAELVKTSRAKPAVSTPSLLLRVLFCAVCGEPAYKFAGGGRRHPRYRCRSMGFLKHCGNGTVAMVEWDAFCEEQVLGLLGDAERLEKVWVAGSDSAVELAEVNAELVDLTSLIGSPAYRAGSPQREALDARIAALAARQEELEGLEARPSGWEWRGTGQRFGDWWREQDTAAKNTWLRSMNVRLTFDVRGGLTRTIDFGDLQEYEQHLRLGSVVERLHTGMS

SEQ ID NO: 13087 - protein, 500 aa, synthetic construct
MRALVVIRLSRVTDATTSPERQLESCQQLCAQRGWDVVGVAEDLDVSGAVDPFDRKRRPNLARWLAFEEQPFDVVVAYRVDRLTRSIRHLQQLVHWAEDHKKLVVSATEAHFDTTTPFAAVVIALMGTVAQMELEAIKERSRSAAHFNIRAGKYRGSLPPWGYLPTRVDGEWRLVPDPVQRERILEVYHRVVDNHEPLHLVAHDLNRRGVLSPKDYFAQLQGREPQGRKWSATALKRSMISGAMLGYATLNGKTVRDDDGAPLVRAEPILTREQLEALRAELVKTSRAKPAVSAPSLLLRVLFCAVCGEPAYKFTGGGRKHPRYRCRSMGFPKHCGNGTVAMAEWDAFCEKQVLDLLGDAERLEKVWVAGSDSAIELAEVNAELVDLTSLIGSPAYRAGSPQREALDARIAALAARQEELEGLEARPSGWEWRETGQRFGDWWREQDTAAKNTWLRSMNVRLTFDVRGGLTRTIDFGDLREYEQHLRSGSVVERLHTGMS

SEQ ID NO: 13088 - protein, 500 aa, synthetic construct
MRALVVIRLSRVTDATTSPERQLESCQQLCAQRGWDVVGVAEDLDVSGTVDPFDRKRRPNLARWLAFEEQPFDVIVACRVDRLTRSIRHLQQLVHWAEDHKKLVVSATEAHFDTTTPFAAVVIALMGTVAQMELEAIKERSRSAAHFNIRAGRYRGSLPPWGYLPTRVDGEWRLVPDPVQRERILEVYHRVIDNHEPLHLVAHDLNRRGVLSPKDYFAQLRGREPQGRKWSATALKRSMISEAMLGYATLNGKTVRDDDGAPLVRAEPILTREQLEALRAELVKTSRAKPAVSTPSLLLRVLFCAVCGEPAYKFAGGGRKHPRYRCRSMGFPKHCGNGTVAMAEWDAFCEEQVLDLLGDVERLEKVWVAGSDPAVELAEVNAELVDLTSLIGSPAYRAGSPQREALDARIAVLAARQEELGGLEARPSGWEWRGTGQRFGDWWREQDTAAKNTWLRSMNVRLTFDVRGGLTRTIDFGDLQGYEQHLRLGSEVERLHTGMS

SEQ ID NO: 13089 - protein, 500 aa, synthetic construct
MRALVVVRLSRVTDATTSPERQLESCQQLCAQRGWDVVGVAEDLDVSGAVDPFDRKRRPNLARWLAFEEQPFDAIVAYRVDRLTRSIRHLQQLVHWAEDHKKLVVSATEAHFDTTTPFAAVTTALMGTVAQMELEAIKERSRSAAHFNIRAGKYRGSLPPWGYLPTRVDGEWRLAPDPVQRERILEVYHRVVDDHEPLHSVAHDLNRRGVLSPRDYFAQLQGRGPRGRKWSATALKRSMISEAMLGYVTLNGKTVRDDDGAPLVRAEPILTREQLEALRAELVKTSRAKPAVSTPSLLLRVLFCAVCGEPAYKFAGGGRKHPRYRCRSMGFPEHCGNGTVAMAEWDAFCEEQVLGLLGDAERLEKVWVAGSDSAVELAEVNAELVDLTSLIGSRAYRAGSPQREALDARIAALAARQEELEGLEARPSGWGWRETGQRFGDWWREQNTAAKNTWLRSMNVRLTFDVRGGLTRMIDFGDLQEYEQHLRLGSVVERLHTGTS

SEQ ID NO: 13090 - protein, 500 aa, synthetic construct
MRALVVIRLSRVTDATTSPERQLESCQQLCAQRGWDVVGVAEDLDVSGAVDPFDRKRRPNLARWLAFEEQPFDAIVAYRVDRLARSIRHLQQLVHWAEDRKKLVVSATEAHFDTTTPFAAVVIALMGTVAQMELEAIKERSRSATHFNIRAGKYRGSLPPWGYLPARVDGEWRLVPDPVQRERILEVYHRVVDNHEPLHLVAHDLNRRGVLSPKDYFAQLRGREPQGRRWSATALKRSMISEAMLGYATLNGKTVRGDDGAPLVRAEPILTREQLEALRVELVKTSRAKPAVSTPSLLLRVLFCAVCGEPAYKFAGGGRKHPRYRCRSMGFPKHCGNGTLAMAEWDAFCEEQVLNLLGDAERLEKVWVAGSDSAVKLAEVNAELVDLTSLIGSPAYRAGSLQREALDARIAALAARQEELEGLEARPSGWEWRETGQRFGDWWREQDTAAKNTWLRSMNVRLTFDVRGGLTRTIDFGDLQEYEQHLRLGSVVERLHTGMS

SEQ ID NO: 13091 - protein, 500 aa, synthetic construct
MRALVVIRLSRVTDATTSPERQLESCQQLCAQRGWDVVGVAEDLDVSGAVDPFDRKRRPNLARWLAFEEQPFDVIVAYRVDRLARSIRHLQQLVHWAEDHKKLVVSATEAHFDTTTPFAAVVIALMGTVAQMELEAIRERNRSAAHFNIRAGKYRGSLPPWGYLPTRVDGEWRLAPDPVQRERILEVYHRVVDNHEPLHLVAHDLNRRGVLSPRDYFAQLQGREPQGRRWSATALKRSMISEAMLGYATLNGKTVRDDDGAPLVRAEPILTREQLEALRAELVMTSRAKPAVSTPSLLLRVLFCAVCGEPAYKFAGGGRKHPRYRCRSMGFPKHCGNGTVAMAEWDAFCEEQVLGLLGDAERLEKVWVAGSDSAVELAEVNAELVDLTSLIGSPAYRAGSPQREALDARIAALAARQEELEGLEARPSGWEWRETGQRFGDWWREQDTAAKNTWLRSMNVRLTFDVRGGLTRTIDFGDLQEYVQHLRLGSVVGRLHTGMS

SEQ ID NO: 13092 - protein, 500 aa, synthetic construct
MRALVVIRLSRVTDATTSPERQLESCQRLCAQRGWDVVGVAEDLDVSGAVNPFDRKRRPNLARWLAFEEQPFDAVVAYRVDRLTRSIRHLQQLVHWAEDHKKLVVSATEAHFDTTTPFAAVVIALMGTVAQMELEAIKERSRSAAHFNIRAGKYRGSLPPWGYLPTRVDGEWRLAPDPVQRERILEVYHRVVDNHEPLHLVAHDLNRRGVLSPKDYFAQLQGREPQGRKWSATALKRSMISEAMLGYATLNGKIVRDGDGAPLVRAEPILTRGQLEALRAELVRTSRAKPAVSTPSLLLRVLFCAVCGEPAYKFSGGGRKHPRYRCRSMGFPKHCGNGTVAMAEWDAFCEEQVLDLLGDAERLEKVWAAGSDSAVELAEVNKELVDLTSLIGSPAYRAGSPQREALDARIAALAARQEELEGLEARPSGWEWRETGQRFGDWWREQDTAAKNTWLRSMNVRLTFDVRGGLTRTIDFGDLQEYEQHLRLGSVVERLDTGMS

SEQ ID NO: 13093 - protein, 500 aa, synthetic construct
MRALVVIRLSRVTDATTSPERQLESCQQLCAQRGWDVVGVAEDLDVSGAVDPFDRKRRPNLARWLAFEERPFDVIVAYRVDRLTRSIRHLQQLVHWAEDRKKLVVSATEAHFDTTTPFAAVVIALMGTVAQMELEAIKERSRSAAHFNIRAGKYRGSLPPWGYLPTRVDGEWRLAPDPVQRERILEVYHRVVDNHEPLHLVAHDLNRRGVLSPKDHFAQLQGREPQGRKWSATALKRSMISVAMLGYATLNGKTVRDDDGAPLVRAEPILTRGQLEALRAELVKTSRAKPAVSTPSLLLRVLFCAVCGEPAYKFAGGGRKHPRYRCRSMGFPKHCGNGTVAMAEWDAFCEEQVLDLLGDAERLEKVWVVGSDSAVELAEVNAELVDLTSLIGSPAYRAGSPQREALDARIAALAARQEELEGSEAHPSGWEWRETGQRFGDWWREQDIAAKNTWLRSMNVRLTFDVRGGLTRTIDFGDLQEYEQHLRLGSVVGRLHTGMS

SEQ ID NO: 13094 - protein, 500 aa, synthetic construct
MRALVVIRLSRVTDATTSPERQLESCQQLCAQRGWDVVGVAEDLDVSGAVDPFDRKRRPNLARWLAFEEQPFDAIVAYRVDRLTRSIRHLQQLVHWAEDHKKLVVSATEAHFDTTTPFAAVVIALMGTVAQMELEAIKERNRSAAHFNIRAGKYRGSLPPWGYLPTRVDGEWRLVPDPVQRERILEVYHRVVDNHEPLHLVAHDLNRRGVLSPKDYFAQLRGREPQGRKWSATALKRSMISEAMLGYATLNGKTVRDDGGTPLVRAEPILTREQREALRAELVKTSRAKPAVSTPSLLLRVLFCAVCGEPAYKFAGGGRKHPRYRCRSMGFPKHCGNGTVAMAEWDAFCEEQVLDLLGDAERLEKVWVAGSDSAVELAEVNAELVDLTSLIGSPAYRAGSPQREALDARITALAARQEELEGLEAHPSGWEWRETGQRFGDWWREQDTAAKNTWLRSMNVRLTFDVRGGLTRTIDFGDLQEYERRLRLGSVAERLHTGMS

SEQ ID NO: 13095 - protein, 500 aa, synthetic construct
MRALVVIRLSRVTDATTSPERQLESCQQLCARRGWDVVGVAEDLDVSGAVDPFDRKRRPNLARWLAFEERPFDVIVAYRVDRLTRSIRHLQQLVHWAEDHKKLVVSATEAHFDTTTPFAAVVIALMGTVAQMELEAIKERNRSAAHFNIRAGKYRGSLPPWGYLPTRVDGEWRLVPDPVQRERILEVYHRVVDNHEPLHLVAHDLNRRGVLSPKDYFAQLRGREPQGRKWSATALKRSMTSEAMLGYATLNGKTVRDDGGAPLVRAEPILTREQLEALRAELVKTSRAKPAVSTPSLLLRVLFCAVCGEPAYKFAGGGRKHPRYRCRSMGFPKHCGNGTVAMAEWDAFCEEQVLNLLGDAERLEKVWVAGSDSAVELAEVNAELVDLTSLIGSPAYRAGSLQREALDARIAALAARQEELEGLEARPSGWGWRETGQRFGDWWREQDTAAKNTWLRSMNVRLTFDVRGGLTRTIDFGDLQEYEQHLRLSSVVERLHTGMS

SEQ ID NO: 13096 - protein, 500 aa, synthetic construct
MRALVVIRLSRVTDATTSPERQLESCQQLCAQRGWDVVGVAEDLDVSGAVDPFDRKRRPNLARWLAFEEQPFDVIVAYRVDRLTRSVRHLQQLVHWAEDHEKLVVSATEAHFDTTTPFAAVVIALMGTVAQMELEAIRERNRSAAHFNIRAGKYRGSLPPWGYLPTRVDGEWRLAPDPVQRERILEVYHRVVDNHEPLHLVAHDLNQRGVLSPRDYFAQLQGREPQGRKWSATALKRSMTSEAMLGYATLNGKTVRDDDGAPLVRAEPILTREQLEALRAELVKTSRAKPAVSTPSLLLRVLFCAVCGEPAYKFAGGGRKHPRYRCRSMGFPKHCGNGTVAMAEWDAFCEEQVLDLLGDAERLEKVWVAGSDSAVELAEVNAELVDLTSLIGSPTYRAGSPQREALDARIAALAARQEELEGLEARPSGWEWRETGQRFGDWWRGQDTAAKNTWLRLMNVRLTFDVRGGLTRTIDFGDLQEYEQHLRLGSVVERLHTGMS

SEQ ID NO: 13097 - protein, 500 aa, synthetic construct
MRVLVVIRLSRVTDATTSPERQLESCQQLCAQRGWDVVGVAEDLDVSGAVDPFDRKRRPNLARWLAFEEQPFDVIVAYRVDRLARSVRHLQQLVRWAEDHKKLVVSATEAHFDTTTPFAAVVIALMGTVAQMELEAIKERSRSAAHFNIRAGKYRGSLPPWGYLPMRVDGEWRLVPDPVQRERILEVYHRVVDNHEPLHLVAHDLNRRGVLSPKDYFAQLRGREPQGRKWSATALKRSMISVAMLGYATLCGKTVRDDDGAPLVRAEPILTREQLEALRAELVRTSRAKPAVSTPSLLLRVLFCAVCGEPAYKFAGGGRKHPRYRCRSMGLPKHCGNGTVAMAEWDAFCEEQVLNLLGDAERLEKVWVAGSDSAVELAEVNKELVDLTSLIGSPAYRAGSPQREALDARIAALAARQEELEGLEARPSGWEWRETGQRFGDWWREQDTAAKNTWLRSMNVRLTFDVRGGLTRTIDFGDLQEYEQHLRSGGVVERLHTGMS

SEQ ID NO: 13098 - protein, 500 aa, synthetic construct
MRALVVIRLSRVTDATTSPERQLESCQQLCAQRGWDVVGVAEDLDVSGAVDPFDRKRRPNLARWLAFEEQPFDAIVAYRVDRLTRSIRHLQQLVHWAEDHKKLVVSATEAHFDTTTPFAAVVIALMGTVAQMELEAIKERNRSAAHFNIRAGKYRGSLPPWGYLPARVGGEWRLVPDPVQRERILEVYHRVVDNHEPLYLVAHDLNRRGVLSPKDYFAQLRGREPQGRKWSATALKRSMISVAMLGYATLCGKTVRDDDGAPLVRAEPILTREQLEALRAELVKTSRAKPAVSTPSLLLRVLFCAVCGEPAYKFAGGGRKHPRYRCRSMGFPKHCGNGTVAMAEWDAFCEEQVLNLLGDAERLEKVWVAGSDSAVELAEVNAELVDLTSLIGSPTYRAGSPQREALDARIAALTARREELEGLEARPSGWEWRKTGQRFGDWWREQDTAAKNTWLRSMNVRLTFDVRGGQTRTIDFGDLQEYEQHLRLGSVVERLRTGMS

SEQ ID NO: 13099 - protein, 500 aa, synthetic construct
MRALVVIRLSRVTDATTSPERQLESCQQLCAQRGWDVVGVAEDLDVSGAVDPFDRKRRPNLARWLAFEEQPFDAVVAYRVDRLTRSIRHLQQLVHWAEDHKKLVVSATEAHFDTTTPFAAVVIALMGTVAQMELEAIKERNRSAAHFNIRAGKYRGSLPPWGYLPTRVDGEWRLAPDPVQRERILEVYHRVVDNHEPLHSVAHDLNRRGVLSPKDYFAQLRGREPQGRKWSATALKRSMISEAMLGYATLNGKTVRDDDGAPLVRAEPILTREQLEALRAELVKTSRAKPAVSTPSLLLRVLFCAVCGEPAYKFSGGGRKHPRYRCRSMGFPKHCGNGTVAMAEWDAFCEEQVLDLLGDAERLEKVWVAGSDSAVELAEVNAELVDLTSLIGSPAYRAGSPQREALDARIAALAARQEELEGLEARPSGWEWRETGQRFGDWWREQDTAAKNTWLRSMNVRLTFDVRGGLTRTIDFGDLQEYEQHLRLGSMVERLHTGTS

SEQ ID NO: 13100 - protein, 500 aa, synthetic construct
MRALVVIRLSRVTDATTSPERQLESCQQLCAQRGWDVVGVAEDLDVSGAVDPFDRKRRPNLARWLAFEEQPFDVIVAYRVDRLARSIRHLQQLVHWAEDHKKLVVSATEAHFDTTTPFAAVVIALMGTVAQMELEAIKERSRSAAHFNIRAGKYRGSLPPWGYLPTRVDGEWRLAPDPVQRERILEVHRRVVDNHEPLHLVAHDLNRRGVLSPRDYFAQLQGREPQGRKWSATALKRSMTSEAMLGYATLNGKTVRDDDGAPLVRAEPILTREQLEALRAELVKTSRAKPAVSTPSLLLRVLFCAVCGEPAYKFAGGGRKHPRYRCRSMGFPKHCGNGTVAMAEWDAFCEEQVLDLLGDAKRLEKVWVAGSDSAVELAEVNAELVDLTSLIGSPAYRAGSPQREALDARIAALAARQEELEGLEARPAGWEWRETGQRFGDWWREQDTAAKNTWLRSMNVRLTFDVRGGLTRTIDFGDLQEYEQHLRLGNMVERLHTGMS

SEQ ID NO: 13101 - protein, 500 aa, synthetic construct
MRALVVIRLSRVTDATTSPERQLESCQQLCAQRGWDVVGVAEDLDVSGAVDPFDRKRRPNLARWLAFEEQPFDVIVAYRVDRLARSIRHLQQLVHWAEDHKKLVVSATEAHFDTTTPFAAVVIALMGTVAQMELEAIRERSRSAAHFNIRAGKYRGSLPPWGYLPARVDGEWRLVPDPVQRERILEVYHRVVDNHEPLHLVAHDLNRRGVLSPKDYFAQLQGREPQGRKWSATALKRSMISEAMLGYATLNGKTVRDDDGAPLVRAEPILTREQLEALRAELVKATRAKPAVSTPSLLLRVLFCAVCGGPAYKFAGGGRKHPRYRCRSMGFPKHCGNGTVAMAEWDAFCEEQVLNLLGDAERLEKVWVAGSDSAVELAEVNAELVDLTSLISSPAYRAGSPQREVLDARIAALVARQEGLEGLEARPSGWEWRETGQRFGDWWREQDTAAKNTWLRSMNVRLTFDVRGGLTRTIDFGDLQEYEQHLRLGSVVERLHTGMS

SEQ ID NO: 13102 - protein, 500 aa, synthetic construct
MRALVVIRLSRVTDATTSPERQLESCQQLCAQRGWDVVGAAEDLDVSGAVDPFDRKRRPNLARWLAFEEQPFDAIVAYRVDRLTRSIRHLQQLVHWAEDHKKLVVSATEAHFDMTTPFAAVVIALMGTVAQMELEAIKERSRSAAHFNIRAGKYRGSLPPWGYLPTRVDGEWRLAPDPVQRERILEVYHRVVDNHEPLHLVAHDLNRRGVLSPKDYFAQLQGREPQGRKWSATALKRSMISVTMLGYATLNGKTVRDDDGAPLVRAEPILTREQLEALRAELVKTSRAKPAVSTPSLLLRVLFCAVCGEPAYKFAGGGRKHPRYRCRSMGFPKHCGNGTVAMAEWDAFCEEQVLGLLGDVERLEKIWVAGSDSAVKLAEVNAELVDLTSLIGSPAYRAGSPQREALDARIAALAARQEELEGLEARPSGWEWRGTGQRFGDWWREQDTAAKNTWLRSMNVRLTFDVRGGLTRTIDFGDLQEYEQHLRLGSVVERLHTGMS

SEQ ID NO: 13103 - protein, 500 aa, synthetic construct
MRALVVIRLSRVTDATTSPERQLESCQQLCAQRGWDVVGVAEDLDVSGAVDPFDRKRRPNLARWLAFEEQPFDVIVAYRVDRLARSIQHLQQLVHWAEDHKKLVVSATEAHFDTTTPFAAVVIALMGTVAQMELEAIKERSRSAAHFNIRAGKYRGSLPPWGYLPARVDGEWRLVPDPVQRERILEVYHRVVDNHEPLHLVAHDLNRRGVLSPKDYFAQLRGREPQGRKWSATALKRSMISVAMLGYATLCGKTVRDDDGAPLVRAEPILTREQLEALRAELVKTSRAKPAVSTPSLLLRVLFCAVCGEPAYKFAGGGRKHPRYRCRSMGFPEHCGNGTVAMAEWDAFCEEQVLNLLGDAERLEKVWVAGSDSAVELAEVNKELVDLTSLIGSPAYRAGSPQREALDARIAALAARQEELEGLEARPSGWEWRGTGQRFGDWWRELDTAAKNTWLRSMNVRLTFDVRDGLTRTIDFGDLQEYEQHLRLGSVVERSHTGMS

SEQ ID NO: 13104 - protein, 500 aa, synthetic construct
MRALVVIRLSRVTDATTSPERQLESCQQLCAQRGWDVVGVAEDLDVSGAVDPFDRKRRPNLARWLAFEEQPFDVIVAYRVDRLTRSVRHLQQLVHWAEDHKKLVVSVTEAHFDTTTPFAAVVIALMGTVAQMELEAIKERNRSAAHFNIRAGKYRGSLPPWGYLPARVDGEWRLVPDPVQRERILEVYHRVVDNHEPLHLVAHDLNRRGVLSPKDYFAQLQGREPQGRKWSATALKRSMTSVAMLGYATLNGKTVRDDDGAPLVRAEPILTREQLEALRAELVKTSRAKPAVSTPSLLLRVLFCAVCGEPAYKFAGGGRKHPRYRCRSMGFPKHCGNGTVAMAEWDAFCEEQVLDLLGDAERLEKVWVAGSDSAVELAEVNAELVDLTSLIGSPAYRAGSPQREALDARIAALAARQEELEGLEARPSGWEWRETGQRFGDWWREQDTAAKNTWLRSMNVRLTFDVRGGLTRTIDFGDLQEYEQHLRLGSVVERLHAGMS

SEQ ID NO: 13105 - protein, 500 aa, synthetic construct
MRALVAIRLSRVTDATTSPERQLESCQQLCAQRGWDVVGVAEDLDVSGAVDPFDRKRRPNLARWLAFEEQPFDVIVAYRVDRLTRSIRHLQQLVHWAEDHKKLVVSATEAHFDTTTPFAAVVIALMGTVAQMELEAIKERSRSAAHFNIRAGKYRGSLPPWGYLPARVDGEWRLVPDPVQRERILEVYHRVVDDHEPLHLVAHDLNRRGVLSPKDYFAQLRGREPQGRKWSATALKRSMISEAMLGYATLDGKTVRDDDGAPLVRAEPILTREQLEALRAELVKTPRAKPAVSAPSLLLRVLFCAVCGEPAYKFAGGGRKHPRYRCRSMGFPKHCGNGTVAMAEWDAFCEEQVLNLLGDAERLEKVWVAGSDSAVELAEVNAELVDLTSLIGSPAYRAGSPQREALDARIAALAARQEELEGLEARPSGWEWRETGQRFGDWWREQDTAAKNTWLRSMNVRLTFDVRGGLTRTIDFGDLQEYEQHLRLGSVVERSHTGMS

SEQ ID NO: 13106 - protein, 500 aa, synthetic construct
MRALVVIRLSRVTDATTSPERQLESCQQLCAQRGWDVVGVAEDLDVSGAVDPFDRKRRPNLARWLAFEEQPFDVIVAYRVDRLTRSIRHLQQLVHWAEDHKKLVVSATEAYFDTTTPFAAVVIALMGTVAQLELEAIKERSRSAAHFNIRAGKYRGSLPPWGYLPTRVDGEWRLAPDPVQRERILEVYHRVVDNHEPLHLVAHDLNRRGVLSPKDYFARLQGREPQGRKWSATALKRSMTSEAMLGYATLNGKTVRDDDGAPLVRAEPILTREQLEALRAELVKTSRAKPAVSTPSLLLRVLFCAVCGEPAYKFSGGGRKHPRYRCRSMGFPKHCGNGTVAMAEWDAFCEEQVLDLLGDAERLEKVWVAGSDSAVELAEVNAGLVDLTSLIGSPDYRAGSPQREALDARIAALAARQEELEGLEARPSGWEWCETGQRFGDWWREQDTAAKNTWLRSMNVRLTFDVRGGLTRTIDFGDLQEYEQHLRLGSVVERLHTGMS

SEQ ID NO: 13107 - protein, 500 aa, synthetic construct
MRALVVIRLSRVTDATTSPERQLESCQQLCAQRGWDVVGVAEDLDVSGAVDPFDRKRRPDLARWLAFEEQPFDVIVAYRVDRLARSIRHLQQLVHWAEDHKKLVVSATEAHFDTTTPFAAVVIALMGTVAQMELEAIKERNRSAAHFNIRAGKYRGSLPPWGYLPTRVDGEWRLVPDPVQRERILEVYHRVVDKHEPLHLVAHDLNRRGVLSPRDYFAQLRGREPQGRKWSATALKRSMISEAMLGYATLNGKTVRDDDGAPLVRAEPILTREQLEALRAELVKTSRAKPAVSTPSLLLRVLFCAVCGEPAYKFAGGGRKHPRYRCRSMGFPKHCGNGTVAMAEWDAFCEEQVLDLLGGAERLEKVWVAGSDSAVELAEVSAELVDLTSLIGSTAYRAGSPQREALDARIAALAARQGELEGLEARPSGWEWRETGQRFGDWWREQDTAAKNTWLRSMNVRLTFDVRGGLTRTIDFGDLQEYEQHLRLGSVVERLHTGMS

SEQ ID NO: 13108 - protein, 500 aa, synthetic construct
MRALVVIRLSRVTDATTSPERQLESCQQLCAQRGWDVVGVAEDLDVSGAVDPFDRKRRPNLARWLAFEEQPFDVIVAYRVDRLTRSTRHLQQLVHWAEDHKKLVVSATEAHFDTTTPFAAVVIALMGTVAQMELEAIKERSRSAAHFNIRAGKYRGSLPPWGYLPTRVDGEWRLAPDPVQRERILEVYHRVVDNHEPLHLVAHDLNRRGVLSPKDYFAQLQGREPQGRKWSATALKRSMISEAMLGYATLNGKTVRGDDGAPLVRAEPILTREQLEALRAELVKTSRAKPAVSTPSLLLRVLFCAVCGEPAYKFAGGGRKHPRYRCRSMGFPKHCGNGTVAMAEWDVFCEEQVLDLLGDAERLEKVWVAGSDSAVELAEVNAELVDLTSLIGSPAYRAGSPQREALDARIAALAARREELEGLEARPSGWEWRGTGQRFGDWWREQDTAARNTWLRSMNVRLTFDVRGGLTRTIDFGDLQEYEQHLRLGSVVERLHTGMS

SEQ ID NO: 13109 - protein, 500 aa, synthetic construct
MRALVVIRLSRVTDATTSPERQLESCQQLCAQRGWDVVGVAEDLDVSGAVDPFDRKRRPNLARWLASEEQPFDVIVAYRVDRLTRSTRHLQQLVHWADDHKKLVVSATEAHFDTTTPFAAVVIALMGTVAQMELEAIKERSRSAAHFNIRAGKYRGSLPPWGYLPTRVDGEWRLVPDPVQRERILEVYHRVVDNHEPLHLVAHDLNRRGVLSPKDYFAQLRGREPQGRKWSATALKRSMISEAMLGYATLGGKTVRDDDGAPLVRAEPILTREQLEALRAELVKTSRAKPAVSTPSLLLRVLFCAVCGEPAYKFAGGGRKHPRYRCRSMGFPKHCGNGTVAMAEWDAFCEDQVLDLLGDAERLEKVWVAGSDSAVELAEVIAELVDLTSLIGSPAYRAGSPQREALDARIAALAARQEELEGLETRPSGWEWRETGQRFGDWWREQDTAAKNTWLRSMNVRLTFDVRGGLTRTIDFGDLQEYEQHLRLGSMVERLHTGVS

SEQ ID NO: 13110 - protein, 500 aa, synthetic construct
MRALVVIRLSRVTDATTSPERQLESCQQLCAQRGWDVVGVAEDLDVSGAVDPFDRKRRPNLARWLAFEERPFDVIVAYRVDRLARSIRHLQQLVHWAEDHKKLVVSATEAHFDTTTPFAAVVIALMGTVAQMELEAIKERSRSAAHFNIRAGKYRGSLPPWGYLPTRVDGEWRLVPDPAQRERILEVYHRVVDNHEPLHLVAHDLNRRGVLSPRDYFAQLRGREPQGRKWSATALKRSMISEAMLGYATLNGRTVRDDDGAPLVRAEPILTREQLEALRAELVKTSRAKPAVSTPSLLLRVLFCAVCGEPAYKFAGGGRKHPRYRCRSMGFPKHCGNGTVAMAEWDAFCEEQVLNLLGDAERLEKVWVAGSDSAVELAEVNAELVDLTSLIGSPAYRAGSPQRRALDARIAALAARQEELEGLEACPSGWEWRETGQRFGDWWREQDTAARNTWLRSMNVRLTFDVRGGLTRTIDFGDLQEYEQHLRLGSVDERLHTGMS

SEQ ID NO: 13111 - protein, 500 aa, synthetic construct
MRALVVIRLSRVTDATTSPERQLESCQQLCAQRGWDVVGVAEDLDVSGAVDPFDRKRRPNLARWLAFEEQPFDAIVAYRVDRLTRSIRHLQQLVHWAEDHKKLVVSATEAHFDTTTPFAAVVIALMGTVAQMELEAIKERSRSAAHFNIRAGKYRGSLPPWGYLPARVDGEWRLVPDPVQRERILEVYHRVVDNHEPLHSVAHDLNRRGVLSPKDYFAQLQGREPQGRKWSATALKRSMISVAMLGYATLNGKIVRDDDGAPLVRAEPILTREQLEALRAELVKTSRAKPAVSAPSLLLRVLFCAVCGEPAYKFAGGGRKHPRYRCRSMGFPKHCGNGTVAMAEWDAFCEEQVLNLLGDAERLEKVWVAGSDSAVELAEVNAELVDLTSLIGSPAYRAGSPQREALDARIAALAARQEELEGLEARPSGWEWRETGQCFRDWWREQDTAAKNTWLRSMNVRLTYDVRGGLTRTIDFGDLQEYEQHLRLGSVVERLHTGMS

SEQ ID NO: 13112 - protein, 500 aa, synthetic construct
MRALVVIRLSRVTDATTSPERQLESCQQLCAQRGWDVVGAAEDLDVSGAVDPFDRKRRPNLARWLAFEEQPFDVIVAYRVDRLTRSIRHLQQLVHWAEDHKKLVVSATEAHFDMTTPFAAVVIALMGTVAQMELEAIKERSRSAAHFNIRAGKYRGSLPPWGYLPTRVNGEWRLAPDPVQRERILEVYHRVVDNHEPLHLVAHDLNRRGVLSPKDYFAQLRGRKPQGRKWSAIALKRSMTSEAMLGYATLNGKTVRNDDGAPLVRAEPILTREQLEALRAELVKTSRAKPAVSTPSLLLRVLFCAVCGEPAYKFSGGGRKHPRYRCRSMGFPEHCGNGTVAMAEWDAFCEEQVLDLLGDAERLEKVWVAGSDSAVELAEVNAELVDLTSLIGSPAYRAGSPQREALDARIAALAARQAELEGLEARPSGWEWRETGQGFGDWWREQDTAAKNTWLRSMNVRLTFDVRGGLTRTIDFGDLQEYEQHLRLGSVVERLHTGMS

SEQ ID NO: 13113 - protein, 500 aa, synthetic construct
MRALVVIRLSRVTDATTSPERQLESCQQLCAQRGWGVVGVAEDLDVSGAVDPFDRKRRPNLARWLAFEEQPFDVIVAYRVDRLTRSTRHLQQLVHWAEDHKKLVVSATEAHFDTTTPFAAVVIALMGTVAQMELEAIKERNQSAAHFNIRAGKYRGSLPPWGYLPTRVDGEWRLVPDPVQRERILEVYRRVVDNHEPLHLVAHDLNRRGVLSPKDYFAQLRGREPQGRKWSATALKRSMISEAMLGYAILNGKTVRDDDGAPLVRAEPILTREQLEALRAELVKTSRAKPAVSTPSLLLRVLFCAVCGEPAYKFSGGGRKHPRYRCRSMGFPKHCGNGTVAMAEWDAFCEEQVLDLLGDAERLEKVWVAGSDSTVELAEVNAELVDLTSLIGSPAYRAGSPQREALDARIAALAARQEELGGLEARPSGWEWRGTGQRFGDWWREQDTAARNTWLRSMNVRLTFDVRGGLTRTIDFGDLQEYEQHLRLGSVVERLHTGMS

SEQ ID NO: 13114 - protein, 500 aa, synthetic construct
MRALVVIRLSRVTDATTSPERQLESCQQLCAQRGWDVVGVAQDLDVSGAVDPFDRKRRPNLARWLAFEEQPFDVIVAYRVDRLTRSTRHLQRLVHWAEDHKKLVVSATEAHFDTTTPFAAVVIALMGTVAQMELEAIKERNRSAAHFNIRAGKYRGSLPPWGYLPTRVDGEWRLVPDPVQRERILEVYRRVVDNHEPLHLVAHDLNRRGVLSPRDYFAQLQGREPQGRKWSATALKRSMISEAMLGYATLNGKTVRDDDGAPLVRAEPILTRDQLEAVRAELVKTSRAKPAVSTPSLLLRVLFCAVCGEPAYKFAGGGRKHPRYRCRSMGFPKHCGNGTVAMAEWDAFCEEQVLNLLGDAERLEKVWVAGSDSAAELAEVNAELVDLTSLIGSPAYRAGSPQREALDARIAALAARQEELEGLEARPSGWEWRETGQRFGDWWREQDTAAKNTWLRSMNVRLTFDVRGGLARTIDLGDLQEYEQHLRLGSVVERLHTGMS

SEQ ID NO: 13115 - protein, 500 aa, synthetic construct
MRALVVIRLSRVTDATTSPERQLESCQQLCALRGWDVVGVAEDLDVSGAVDPFDRKRRPNLARWLAFEEQPFDVIVAYRVDRLTRSTRHLQQLVHWAEDHKKLVVSATEAHFDTTTPFAAVVIALMGTVAQMELEAIKERNRSAAHFNIRAGKYRGSLPPWGYLPARVGGEWRLVPDPVQRERILEVYHRVVDNHEPLHLVAHDLNRRGVLSPKDYFAQLKGREPQGRKWSATALKRSMISEAMLGYATLNGETVRDDHGAPLVRAEPILTREQQEALRAALVKTSRAKPAVSTPSLLLRVLFCAVCGEPAYKFAGGERKHPRYRCRSMGFPKHCGNGTVAMAEWDAFCEEQVLNLLGDAERLEKVWVAGSDSAVELAEVNAELVDLTSLIGSPTYRAGSPQREALDARIAALAARQEELEGLEARPSGWEWRETGQRFGDWWREQDTAAKNIWLRSMNVRLTFDVRGGLTRTIDFGDLQEYEQHLRLGSVVERLHTGMS

SEQ ID NO: 13116 - DNA, 10 bp, synthetic construct
  source 1..10: mol_type = other DNA
aaaagctagc

SEQ ID NO: 13117 - DNA, 18 bp, synthetic construct
  source 1..18: mol_type = other DNA
cgccaccatggtgagcaa

SEQ ID NO: 13118 - DNA, 16 bp, synthetic construct
  source 1..16: mol_type = other DNA
aaaaaagcttagatct

SEQ ID NO: 13119 - DNA, 26 bp, synthetic construct
  source 1..26: mol_type = other DNA
cctgcatcgacctagactagctagaa

SEQ ID NO: 13120 - DNA, 20 bp, synthetic construct
  source 1..20: mol_type = other DNA
gcaatgaggtcccagatcct

SEQ ID NO: 13121 - DNA, 21 bp, synthetic construct
  source 1..21: mol_type = other DNA
tggcggtcatattggacatga

SEQ ID NO: 13122 - DNA, 20 bp, synthetic construct
  source 1..20: mol_type = other DNA
tcgggcttcccatacaatcg

SEQ ID NO: 13123 - DNA, 21 bp, synthetic construct
  source 1..21: mol_type = other DNA
cttgcgcctccagaaacattg

SEQ ID NO: 13124 - DNA, 20 bp, synthetic construct
  source 1..20: mol_type = other DNA
gcaatgaggtcccagatcct

SEQ ID NO: 13125 - DNA, 20 bp, synthetic construct
  source 1..20: mol_type = other DNA
tcgggcttcccatacaatcg

SEQ ID NO: 13126 - DNA, 52 bp, synthetic construct
  source 1..52: mol_type = other DNA
gtggtttgtctggtcaaccaccgcggtctcagtggtgtacggtacaaaccca
